(19) United States
(12) Patent Application Publication
(10) Pub. No.: US 2023/0117089 A1
(43) Pub. Date: Apr. 20, 2023

(54) COMPOUNDS AND METHODS FOR MODULATING SPLICING OF PRE-MRNA

(71) Applicant: Ionis Pharmaceuticals, Inc., Carlsbad, CA (US)

(72) Inventors: Frank Rigo, Carlsbad, CA (US); Paymaan Jafar-Nejad, Carlsbad, CA (US)

(73) Assignee: Ionis Pharmaceuticals, Inc., Carlsbad, CA (US)

(21) Appl. No.: 17/904,866

(22) PCT Filed: Feb. 26, 2021
(86) PCT No.: PCT/US21/19954

§ 371 Date: Aug. 23, 2022

Related U.S. Application Data
(60) Provisional application No. 63/085,109, filed on Sep. 29, 2020.
(60) Provisional application No. 62/983,573, filed on Feb. 28, 2020.

(51) Int. Cl. C12N 15/113

(52) U.S. Cl. CPC C12N 15/113; C12N 2310/11; C12N 2310/315; C12N 2310/322; C12N 2310/3341; C12N 2310/345; C12N 2310/346

(57) ABSTRACT

Provided are compounds, methods, and pharmaceutical compositions for modulating splicing of a pre-mRNA in a cell or subject. Such compounds, methods, and pharmaceutical compositions are useful to ameliorate at least one symptom of a disease or disorder.

### SEQUENCE LISTING

[0001] The present application is being filed along with a Sequence Listing in electronic format. The Sequence Listing is provided as a file entitled CORE0158WOSEQ_ST25.txt, created on Feb. 18, 2021, which is 6.43 MB in size. The information in the electronic format of the sequence listing is incorporated herein by reference in its entirety.

### FIELD

[0002] Provided are compounds, methods, and pharmaceutical compositions for modulating splicing of pre-mRNA in a cell or subject. Such compounds, methods, and pharmaceutical compositions are useful to ameliorate at least one symptom of a disease or disorder.

### BACKGROUND

[0003] Newly synthesized RNA molecules, such as primary transcripts or pre-mRNA, are processed to form a transcript with a different nucleobase sequence and/or different chemical modifications relative to the unprocessed form. Processing of pre-mRNAs includes splicing of the pre-mRNA to form a corresponding mRNA. Introns are removed, and exons remain and are spliced together to form the mature mRNA sequence. Splice junctions are also referred to as splice sites with the 5′ side of the junction often called the “5′ splice site,” or “splice donor site” and the 3′ side the “3′ splice site” or “splice acceptor site.” In splicing, the 3′ end of an upstream exon is joined to the 5′ end of the downstream exon. Thus, the unspliced, pre-mRNA has an exon/intron junction at the 5′ end of an intron and an intron/exon junction at the 3′ end of an intron. After the intron is removed, the exons are contiguous at what is sometimes referred to as the exon/exon junction or boundary in the mature mRNA. Cryptic splice sites are those which are less often used but may be used when the usual splice site is blocked or unavailable. Alternative splicing, defined as the splicing together of different combinations of exons, often results in the formation of multiple mRNA transcripts from a single gene.

[0004] Up to 50% of human genetic diseases resulting from a point mutation are caused by aberrant splicing. Such point mutations can either disrupt a current splice site or create a new splice site, resulting in mRNA transcripts comprised of a different combination of exons or with deletions in exons. Point mutations also can result in activation of a cryptic splice site or disrupt regulatory cis elements (i.e., splicing enhancers or silencers) (Cartegni et al., Nat. Rev. Genet., 2002, 3, 285-298; Krawczak et al., Hum. Genet., 1992, 90, 41-54).

[0005] Antisense oligonucleotides have been used to target mutations that lead to aberrant splicing in order to redirect splicing to give a desired splice product (Kole, Acta Biochimica Polonica, 1997, 44, 231-238). Phosphorothioate 2-O-methyl oligoribonucleotides have been used to target the aberrant 5′ splice site of the mutant β-globin gene found in patients with β-thalassemia, a genetic blood disorder.

[0006] Antisense oligonucleotides have also been used to modulate splicing of pre-mRNA containing a mutation that does not cause aberrant splicing but that can be mitigated by altering splicing. For example, antisense oligonucleotides have been used to modulate mutant dystrophin splicing (Dunckley et al. Nucleosides & Nucleotides, 1997, 16, 1665-1668).

[0007] Antisense compounds have been used to block cryptic splice sites to restore normal splicing of HBB (3-globin) and CFTR genes in cell lines derived from β-thalassemia or cystic fibrosis patients, respectively (Lacerra et al., Proc. Natl. Acad. Sci. USA, 2000, 97, 9591-9596; Friedman et al., J. Biol. Chem., 1999, 274, 36193-36199). Antisense compounds have also been used to alter the ratio of the long and short forms of Bcl-x pre-mRNA (U.S. Pat. Nos. 6,172,216; 6,214,986; Taylor et al., Nat. Biotechnol. 1999, 17, 1097-1100) or to force skipping of specific exons containing premature termination codons (Wilton et al., Neuromuscul. Disord., 1999, 9, 330-338).

[0008] Antisense technology is an effective means for modulating the expression of one or more specific gene products, including alternative splice products, and is uniquely useful in a number of therapeutic, diagnostic, and research applications. The principle behind antisense technology is that an antisense compound, which hybridizes to a target nucleic acid, modulates activities such as transcription, splicing or translation through one of a number of antisense mechanisms. The sequence specificity of antisense compounds makes them extremely attractive as tools for target validation and gene functionalization, as well as therapeutics to selectively modulate the expression of genes involved in disease.

### SUMMARY OF THE INVENTION

[0009] Provided herein are oligomeric compounds for modulating splicing of a selected pre-mRNA. In certain embodiments, oligomeric compounds have phosphorothioate internucleoside linkages and phosphodiester internucleoside linkages. In certain embodiments, the internucleoside linkage motif imparts improved tolerability of the oligomeric compound. In certain embodiments, the internucleoside linkage motif imparts improved neurotolerability of the oligomeric compound. In certain embodiments, the internucleoside linkage motif imparts improved activity of the oligomeric compound. In certain embodiments, each nucleoside of the modified oligonucleotide is either a sugar-modified nucleoside or a DNA nucleoside. In certain embodiments, the modified oligonucleotide comprises 1, 2, 3, 4, 5, 6, 7, 8, 9, 10, 11, 12, 13, 14, 15, 16, 17, 18, 19, or 20 sugar-modified nucleosides. In certain embodiments, the oligomeric compound comprises not more than 1, 2, 3, or 4 DNA nucleosides. In certain embodiments, the oligomeric compound is a modified oligonucleotide.

### DETAILED DESCRIPTION OF THE INVENTION

[0010] It is to be understood that both the foregoing general description and the following detailed description are exemplary and explanatory only and are not restrictive. Herein, the use of the singular includes the plural unless specifically stated otherwise. As used herein, the use of “or” means “and/or” unless stated otherwise. Furthermore, the use of the term “including” as well as other forms, such as “includes” and “included”, is not limiting. Also, terms such as “element” or “component” encompass both elements and components comprising one unit and elements and components that comprise more than one subunit, unless specifically stated otherwise.

[0011] The section headings used herein are for organizational purposes only and are not to be construed as limiting the subject matter described. All documents, or portions of documents, cited in this application, including, but not limited to, patents, patent applications, articles, books, and treatises, and GenBank and NCBI reference sequence records are hereby expressly incorporated-by-reference for the portions of the document discussed herein, as well as in their entirety.

### Definitions

[0012] Unless specific definitions are provided, the nomenclature used in connection with, and the procedures and techniques of, analytical chemistry, synthetic organic chemistry, and medicinal and pharmaceutical chemistry described herein are those well-known and commonly used in the art. Where permitted, all patents, applications, published applications and other publications and other data referred to throughout in the disclosure are incorporated by reference herein in their entirety.

[0013] Unless otherwise indicated, the following terms have the following meanings:

[0014] As used herein, “2′-deoxyribonucleoside” means a nucleoside comprising a 2′-H(H) deoxyribosyl sugar moiety. In certain embodiments, a 2′-deoxyribonucleoside is a 2′-β-D deoxyribonucleoside and comprises a 2′-β-D-deoxyribosyl sugar moiety, which has the β-D configuration as found in naturally occurring deoxyribonucleic acids (DNA). In certain embodiments, a 2′-deoxyribonucleoside may comprise a modified nucleobase or may comprise an RNA nucleobase (uracil).

[0015] As used herein, “2′-MOE” means a 2′-OCH₂CH₂OCH₃ group in place of the 2′-OH group of a ribosyl sugar moiety. A “2′-MOE sugar moiety” is a sugar moiety with a 2′-OCH₂CH₂OCH₃ group in place of the 2′-OH group of a ribosyl sugar moiety. Unless otherwise indicated, a 2′-MOE sugar moiety is in the β-D configuration. “MOE” means O-methoxyethyl.

[0016] As used herein, “2′-MOE nucleoside” means a nucleoside comprising a 2′-MOE sugar moiety.

[0017] As used herein, “2′-NMA” means a —O—CH₂—C(═O)—NH—CH₃ group in place of the 2′-OH group of a ribosyl sugar moiety. A “2′-NMA sugar moiety” is a sugar moiety with a 2′-O—CH₂—C(═O)—NH—CH₃ group in place of the 2′-OH group of a ribosyl sugar moiety. Unless otherwise indicated, a 2′-NMA sugar moiety is in the β-D configuration. “NMA” means O—N-methyl acetamide.

[0018] As used herein, “2′-NMA nucleoside” means a nucleoside comprising a 2′-NMA sugar moiety.

[0019] As used herein, “2′-OMe” means a 2′-OCH₃ group in place of the 2′-OH group of a ribosyl sugar moiety. A “2′-OMe sugar moiety” is a sugar moiety with a 2′-OCH₃ group in place of the 2′-OH group of a ribosyl sugar moiety. Unless otherwise indicated, a 2′-MOE sugar moiety is in the β-D configuration. “OMe” means O-methyl.

[0020] As used herein, “2′-OMe nucleoside” means a nucleoside comprising a 2′-OMe sugar moiety.

[0021] As used herein, “2′-substituted nucleoside” means a nucleoside comprising a 2′-substituted sugar moiety. As used herein, “2′-substituted” in reference to a sugar moiety means a sugar moiety comprising at least one 2′-substituent group other than H or OH.

[0022] As used herein, “5-methyl cytosine” means a cytosine modified with a methyl group attached to the 5 position. A 5-methyl cytosine is a modified nucleobase.

[0023] As used herein, “administering” means providing a pharmaceutical agent to a subject.

[0024] As used herein, “ameliorate” in reference to a treatment means improvement in at least one symptom relative to the same symptom in the absence of the treatment. In certain embodiments, amelioration is the reduction in the severity or frequency of a symptom, or the delayed onset or slowing of progression in the severity or frequency of a symptom. In certain embodiments, the symptom is reduced muscle strength; inability or reduced ability to sit upright, to stand, and/or walk; reduced neuromuscular activity; reduced electrical activity in one or more muscles; reduced respiration; inability or reduced ability to eat, drink, and/or breathe without assistance; loss of weight or reduced weight gain; and/or decreased survival.

[0025] As used herein, “antisense activity” means any detectable and/or measurable change attributable to the hybridization of an antisense compound to its target nucleic acid.

[0026] As used herein, “antisense compound” means an oligomeric compound or oligomeric duplex capable of achieving at least one antisense activity.

[0027] As used herein, “bicyclic nucleoside” or “BNA” means a nucleoside comprising a bicyclic sugar moiety.

[0028] As used herein, “bicyclic sugar” or “bicyclic sugar moiety” means a modified sugar moiety comprising two rings, wherein the second ring is formed via a bridge connecting two of the atoms in the first ring thereby forming a bicyclic structure. In certain embodiments, the first ring of the bicyclic sugar moiety is a furanosyl moiety. In certain embodiments, the furanosyl moiety is a ribosyl moiety. In certain embodiments, the bicyclic sugar moiety does not comprise a furanosyl moiety.

[0029] As used herein, a “block of phosphodiester internucleoside linkages” means a single phosphodiester internucleoside linkage or two or more contiguous phosphodiester internucleoside linkages that are either flanked on each side by at least one phosphorothioate internucleoside linkage (an internal block) or are located at one end of a modified oligonucleotide (terminal block) and so one side of the block is the end of the modified oligonucleotide and the other side of the block is adjacent to at least one phosphorothioate internucleoside linkage.

[0030] As used herein, “cerebrospinal fluid” or “CSF” means the fluid filling the space around the brain and spinal cord. “Artificial cerebrospinal fluid” or “aCSF” means a prepared or manufactured fluid that has certain properties of cerebrospinal fluid.

[0031] As used herein, “cEt” means a 4′ to 2′ bridge in place of the 2′OH-group of a ribosyl sugar moiety, wherein the bridge has the formula of 4′-CH(CH₃)—O-2′, and wherein the methyl group of the bridge is in the S configuration. A “cEt sugar moiety” is a bicyclic sugar moiety with a 4′ to 2′ bridge in place of the 2′OH-group of a ribosyl sugar moiety, wherein the bridge has the formula of 4′-CH(CH₃)—O-2′, and wherein the methyl group of the bridge is in the S configuration. “cEt” means constrained ethyl.

[0032] As used herein, “cEt nucleoside” means a nucleoside comprising a cEt sugar moiety.

[0033] As used herein, “chirally enriched population” means a plurality of molecules of identical molecular formula, wherein the number or percentage of molecules within the population that contain a particular stereochemical configuration at a particular chiral center is greater than the number or percentage of molecules expected to contain the same particular stereochemical configuration at the same particular chiral center within the population if the particular chiral center were stereorandom. Chirally enriched populations of molecules having multiple chiral centers within each molecule may contain one or more stereorandom chiral centers. In certain embodiments, the molecules are modified oligonucleotides. In certain embodiments, the molecules are compounds comprising modified oligonucleotides.

[0034] As used herein, “complementary” in reference to an oligonucleotide means that at least 70% of the nucleobases of the oligonucleotide or one or more portions thereof and the nucleobases of another nucleic acid or one or more portions thereof are capable of hydrogen bonding with one another when the nucleobase sequence of the oligonucleotide and the other nucleic acid are aligned in opposing directions. Complementary nucleobases means nucleobases that are capable of forming hydrogen bonds with one another. Complementary nucleobase pairs include adenine (A) with thymine (T), adenine (A) with uracil (U), cytosine (C) with guanine (G), and 5-methyl cytosine (mC) with guanine (G). Complementary oligonucleotides and/or target nucleic acids need not have nucleobase complementarity at each nucleoside. Rather, some mismatches are tolerated. As used herein, “fully complementary” or “100% complementary” in reference to an oligonucleotide, or a portion thereof, means that the oligonucleotide, or portion thereof, is complementary to another oligonucleotide or target nucleic acid at each nucleobase of the shorter of the two oligonucleotides, or at each nucleoside if the oligonucleotides are the same length.

[0035] As used herein, “contiguous” in the context of an oligonucleotide refers to nucleosides, nucleobases, sugar moieties, or internucleoside linkages that are immediately adjacent to each other. For example, “contiguous nucleobases” means nucleobases that are immediately adjacent to each other in a sequence.

[0036] As used herein, a “DNA nucleoside” is a 2′-β-D-deoxyribonucleoside, and comprises a 2′-β-D-deoxyribosyl sugar moiety.

[0037] As used herein, “hybridization” means the pairing or annealing of complementary oligonucleotides and/or nucleic acids. While not limited to a particular mechanism, the most common mechanism of hybridization involves hydrogen bonding, which may be Watson-Crick, Hoogsteen or reversed Hoogsteen hydrogen bonding, between complementary nucleobases.

[0038] As used herein, “internucleoside linkage” means the covalent linkage between contiguous nucleosides in an oligonucleotide. As used herein, “modified internucleoside linkage” means any internucleoside linkage other than a phosphodiester internucleoside linkage. “Phosphorothioate internucleoside linkage” is a modified internucleoside linkage in which one of the non-bridging oxygen atoms of a phosphodiester internucleoside linkage is replaced with a sulfur atom.

[0039] As used herein, “intron retention” means that following splicing of the pre-mRNA, an intron present in the pre-mRNA is present, or retained, in the mRNA.

[0040] As used herein, “mismatch” or “non-complementary” means a nucleobase of a first oligonucleotide that is not complementary with the corresponding nucleobase of a second oligonucleotide or target nucleic acid when the first and second oligonucleotide are aligned.

[0041] As used herein, “motif” means the pattern of unmodified and/or modified sugar moieties, nucleobases, and/or internucleoside linkages, in an oligonucleotide.

[0042] As used herein, “non-bicyclic modified sugar moiety” means a modified sugar moiety that comprises a modification, such as a substituent, that does not form a bridge between two atoms of the sugar to form a second ring.

[0043] As used herein, a “substrate for nonsense mediated decay” is an RNA that comprises a nucleobase sequence, such as, for example, an NMD-inducing exon, that can activate the nonsense mediated decay pathway.

[0044] As used herein, “nucleobase” means an unmodified nucleobase or a modified nucleobase. As used herein an “unmodified nucleobase” is adenine (A), thymine (T), cytosine (C), uracil (U), or guanine (G). As used herein, a “modified nucleobase” is a group of atoms other than unmodified A, T, C, U, or G capable of pairing with at least one unmodified nucleobase. A “5-methyl cytosine” is a modified nucleobase. A universal base is a modified nucleobase that can pair with any one of the five unmodified nucleobases. As used herein, “nucleobase sequence” means the order of contiguous nucleobases in a target nucleic acid or oligonucleotide independent of any sugar or internucleoside linkage modification.

[0045] As used herein, “nucleoside” means a compound comprising a nucleobase and a sugar moiety. The nucleobase and sugar moiety are each, independently, unmodified or modified. As used herein, “modified nucleoside” means a nucleoside comprising a modified nucleobase and/or a modified sugar moiety. “Linked nucleosides” are nucleosides that are connected in a contiguous sequence (i.e., no additional nucleosides are presented between those that are linked).

[0046] As used herein, “sugar-modified nucleoside” means a nucleoside comprising a modified sugar moiety.

[0047] As used herein, “oligomeric compound” means an oligonucleotide and optionally one or more additional features, such as a conjugate group or terminal group. An oligomeric compound may be paired with a second oligomeric compound that is complementary to the first oligomeric compound or may be unpaired. A “singled-stranded oligomeric compound” is an unpaired oligomeric compound. The term “oligomeric duplex” means a duplex formed by two oligomeric compounds having complementary nucleobase sequences. Each oligomeric compound of an oligomeric duplex may be referred to as a “duplexed oligomeric compound.”

[0048] As used herein, “oligonucleotide” means a strand of linked nucleosides connected via internucleoside linkages, wherein each nucleoside and internucleoside linkage may be modified or unmodified. Unless otherwise indicated, oligonucleotides consist of 8-50 linked nucleosides. As used herein, “modified oligonucleotide” means an oligonucleotide, wherein at least one nucleoside or internucleoside linkage is modified. As used herein, “unmodified oligonucleotide” means an oligonucleotide that does not comprise any nucleoside modifications or internucleoside modifications.

[0049] As used herein, “pharmaceutical composition” means a mixture of substances suitable for administering to a subject. For example, a pharmaceutical composition may comprise an oligomeric compound and a sterile aqueous solution.

[0050] As used herein, “pharmaceutically acceptable carrier or diluent” means any substance suitable for use in administering to a subject. Certain such carriers enable pharmaceutical compositions to be formulated as, for example, tablets, pills, dragees, capsules, liquids, gels, syrups, slurries, suspension, and lozenges for the oral ingestion by a subject. In certain embodiments, a pharmaceutically acceptable carrier or diluent is sterile water, sterile saline, sterile buffer solution, or sterile artificial cerebrospinal fluid.

[0051] As used herein, “pharmaceutically acceptable salts” means physiologically and pharmaceutically acceptable salts of compounds. Pharmaceutically acceptable salts retain the desired biological activity of the parent compound and do not impart undesired toxicological effects thereto.

[0052] As used herein, “RNA” means an RNA transcript and includes pre-mRNA and mature mRNA unless otherwise specified.

[0053] As used herein, “splice modulation site” is any portion of a pre-mRNA that, when bound by an oligomeric compound alters splicing of the pre-mRNA compared to the splicing that occurs in the absence of the oligomeric compound. In certain embodiments, a “splice modulation site” is a splice acceptor site. In certain embodiments, a “splice modulation site” is a splice donor site”. In certain embodiments, a “splice modulation site” is a cryptic splice site. In certain embodiments, a “splice modulation site” is an intron/exon junction. In certain embodiments, a “splice modulation site” is located within 50 nucleotides or within 100 nucleotides of an intron/exon junction. In certain embodiments, a splice modulation site is a binding site for proteins that are involved in splicing.

[0054] As used herein, “stereorandom chiral center” in the context of a population of molecules of identical molecular formula means a chiral center having a random stereochemical configuration. For example, in a population of molecules comprising a stereorandom chiral center, the number of molecules having the (S) configuration of the stereorandom chiral center may be but is not necessarily the same as the number of molecules having the (R) configuration of the stereorandom chiral center. The stereochemical configuration of a chiral center is considered random when it is the result of a synthetic method that is not designed to control the stereochemical configuration. In certain embodiments, a stereorandom chiral center is a stereorandom phosphorothioate internucleoside linkage.

[0055] As used herein, “subject” means a human or non-human animal.

[0056] As used herein, “sugar moiety” means an unmodified sugar moiety or a modified sugar moiety. As used herein, “unmodified sugar moiety” means a 2′-OH(H) β-D ribosyl moiety, as found in RNA (an “unmodified RNA sugar moiety”), or a 2′-H(H) β-D deoxyribosyl moiety, as found in DNA (an “unmodified DNA sugar moiety”). Unmodified sugar moieties have one hydrogen at each of the 1′, 3′, and 4′ positions, an oxygen at the 3′ position, and two hydrogens at the 5′ position. As used herein, “modified sugar moiety” or “modified sugar” means a modified furanosyl sugar moiety or a sugar surrogate.

[0057] As used herein, “sugar surrogate” means a modified sugar moiety having other than a furanosyl moiety that can link a nucleobase to another group, such as an internucleoside linkage, conjugate group, or terminal group in an oligonucleotide. Modified nucleosides comprising sugar surrogates can be incorporated into one or more positions within an oligonucleotide and such oligonucleotides are capable of hybridizing to complementary oligomeric compounds or target nucleic acids.

[0058] As used herein, “standard in vivo assay” means the assay described in Example 2 and reasonable variations thereof.

[0059] As used herein, “symptom” means any physical feature or test result that indicates the existence or extent of a disease or disorder. In certain embodiments, a symptom is apparent to a subject or to a medical professional examining or testing the subject.

[0060] As used herein, “target nucleic acid” means a nucleic acid that an antisense compound is designed to affect.

[0061] As used herein, “target region” means a portion of a target nucleic acid to which an oligomeric compound is designed to hybridize.

[0062] As used herein, “terminal group” means a chemical group or group of atoms that is covalently linked to a terminus of an oligonucleotide.

[0063] As used herein, “therapeutically effective amount” means an amount of a pharmaceutical agent that provides a therapeutic benefit to a subject. For example, a therapeutically effective amount improves a symptom of a disease.

### CERTAIN EMBODIMENTS

[0064] The present disclosure provides the following non-limiting numbered embodiments:

Embodiment 1. An oligomeric compound comprising a modified oligonucleotide consisting of 16-20 linked nucleosides, wherein:
[0065] each nucleoside of the modified oligonucleotide is either a sugar-modified nucleoside or a DNA nucleoside, provided that not more than 4 nucleosides are DNA nucleosides; and
[0066] the modified oligonucleotide comprises 1-4 blocks of phosphodiester linkages, wherein each block of phosphodiester linkages consists of a single phosphodiester linkage or of 2-4 contiguous phosphodiester linkages; and wherein each of the remaining internucleoside linkages is a phosphorothioate linkage.
   Embodiment 2. The oligomeric compound of embodiment 1, wherein 4 nucleosides of the modified oligonucleotide are DNA nucleosides.
   Embodiment 3. The oligomeric compound of embodiment 1, wherein 3 nucleosides of the modified oligonucleotide are DNA nucleosides.
   Embodiment 4. The oligomeric compound of embodiment 1, wherein 2 nucleosides of the modified oligonucleotide are DNA nucleosides.
   Embodiment 5. The oligomeric compound of embodiment 1, wherein 1 nucleoside of the modified oligonucleotide is a DNA nucleoside.
   Embodiment 6. The oligomeric compound of embodiment 2, wherein the 4 DNA nucleotides of the modified oligonucleotide are non-contiguous.
   Embodiment 7. The oligomeric compound of any of embodiments 1-6, wherein the 5′ terminal nucleoside of the modified oligonucleotide is a DNA nucleoside.
   Embodiment 8. The oligomeric compound of any of embodiments 1-7, wherein the 3′ terminal nucleoside of the modified oligonucleotide is a DNA nucleoside.
   Embodiment 9. The oligomeric compound of any of embodiments 1-8, wherein the 5′ penultimate nucleoside of the modified oligonucleotide is a DNA nucleoside.
   Embodiment 10. The oligomeric compound of any of embodiments 1-9, wherein the 3′ penultimate nucleoside of the modified oligonucleotide is a DNA nucleoside.
   Embodiment 11. The oligomeric compound of embodiment 1, wherein each nucleoside of the modified oligonucleotide is a sugar-modified nucleoside.
   Embodiment 12. The oligomeric compound of any of embodiments 1-11, wherein at least one sugar-modified nucleoside of the modified oligonucleotide is a 2′-substituted nucleoside.
   Embodiment 13. The oligomeric compound of any of embodiments 1-12, wherein at least one sugar-modified nucleoside of the modified oligonucleotide is a bicyclic nucleoside.
   Embodiment 14. The oligomeric compound of any of embodiments 1-12, wherein each sugar-modified nucleoside of the modified oligonucleotide is either a 2′-substituted nucleoside or a bicyclic nucleoside.
   Embodiment 15. The oligomeric compound of any of embodiments 1-11, wherein each sugar-modified nucleoside of the modified oligonucleotide is a 2′-substituted nucleoside.
   Embodiment 16. The oligomeric compound of any of embodiments 1-11, wherein each sugar-modified nucleoside of the modified oligonucleotide is a bicyclic nucleoside.
   Embodiment 17. The oligomeric compound of any of embodiments 12, 14, 15 wherein at least one 2′-substituted nucleoside is selected from a 2′-MOE nucleoside, a 2′-NMA nucleoside, and a 2′-OMe nucleoside.
   Embodiment 18. The oligomeric compound of any of embodiments 12, 14, 15 wherein each 2′-substituted nucleoside is independently selected from a 2′-MOE nucleoside, a 2′-NMA nucleoside, and a 2′-OMe nucleoside.
   Embodiment 19. The oligomeric compound of any of embodiments 12, 14, 15 wherein at least one 2′-substituted nucleoside is a 2′-MOE nucleoside.
   Embodiment 20. The oligomeric compound of any of embodiments 12, 14, 15 wherein each 2′-substituted nucleoside is a 2′-MOE nucleoside.
   Embodiment 21. The oligomeric compound of any of embodiments 12, 14, 15 wherein at least one 2′-substituted nucleoside is a 2′-NMA nucleoside.
   Embodiment 22. The oligomeric compound of any of embodiments 12, 14, 15 wherein each 2′-substituted nucleoside is a 2′-NMA nucleoside.
   Embodiment 23. The oligomeric compound of any of embodiments 13, 14, or 16-22, wherein at least one bicyclic nucleoside is selected from a cEt nucleoside, an LNA nucleoside, and an ENA nucleoside.
   Embodiment 24. The oligomeric compound of any of embodiments 13, 14, or 16-22, wherein each bicyclic nucleoside is selected from: a cEt nucleoside, an LNA nucleoside, and an ENA nucleoside.
   Embodiment 25. The oligomeric compound of embodiment 1, wherein the modified oligonucleotide has a sugar motif (5′ to 3′) selected from: eeeeeeeeeeeeeeeeeeee, eeeeeeeeeeeeeeeeeee, eeeeeeeeeeeeeeeeee, eeeeeeeeeeeeeeeee, eeeeeeeeeeeeeeee, nnnnnnnnnnnnnnnn, nnnnnnnnnnnnnnnnn, nnnnnnnnnnnnnnnmm nnnnnnnnnnnnnnnnnn, nnnnnnnmnummnnnmnmnn nennnnneneennnnnnn, nnnnnnnnnnnnenneen, nennnnneneenenneen, nnnnnnnnnnnnnne, nnnnnnnnnnnnnnnnnnd, nnnnnnnnnnnnnnnnnny, nnnnnnnnnnnnnnnnnndd, nnnnnnnnnnnnnnnnnned, nnnnnnnnnnnnnnnnnnde, nnnnnnnnnnnnnnnnnnee, eeeeeeeeeeeeeeeeeedd, eeeeeeeeeeeeeeeeeeed, eeeeeeeeeeeeeeeeeede, nnnnnnnnnnnnnnnnnnd, nnnnnnnnnnnnnnnnnne, eeeeeeeeeeeeeeeeeed, keekeekeekeekeeeek, keeekeeekeeekeeeek, keeeeekeeeeekeeeek, keeeeeeekeeeeeeeek, keeeeeeeeeeeeeeeek, eeekeekeekeekeekek, eeekeekeekeekeekee, eeeeeekeekeekeekee, eeeeeekeekeekeeeee, eeeeeekeeeeekeeeee, keekeekeekeeeeeeee, eeeeeeeekeekeekeek, keekeekeeeeeeeeeee, eeeeeeeeeeekeekeek, keekeeeeeeeeeeeeee, eeeeeeeeeeeeeekeek, keekeekeekeekeeek, keeekeeekeeekeeek, keeeekeeeeekeeeek, keeeeeeekeeeeeeek, keeeeeeeeeeeeeeek, eekeekeekeekeekek, eekeekeekeekeekee, eeeeekeekeekeekee, eeeeekeekeekeeeee, eeeeekeeeeekeeeee, keekeekeekeeeeeee, eeeeeeekeekeekeek, keekeekeeeeeeeeee, eeeeeeeeeekeekeek, keekeeeeeeeeeeeee, eeeeeeeeeeeeekeek, keekeekeekeekeek, keeekeeekeeekeek, keeeekeeeekeeeek, keeeeeeekeeeeeek, keeeeeeeeeeeeeek, kekeekeekeekeeke, eekeekeekeekeeke, eeeeekeekeekeeke, eeeeekeekeekeeee, eeeeekeeeeekeeee, keekeekeekeeeeee, eeeeeekeekeekeek, keekeekeeeeeeeee, eeeeeeeeekeekeek, keekeeeeeeeeeeee, eeeeeeeeeeeekeek, eeeeeeeeeeeeeeeeeed, eeeeeeeeeeeeeeeeeey, ennnnnnnnnnnnnnnnnn, and ennnnnnnnnnnnnnnnnne; wherein ‘e’ represents a 2′-MOE sugar moiety, ‘n’ represents a 2′-NMA sugar moiety, ‘k’ represents a cEt sugar moiety, ‘d’ represents a 2′-β-D-deoxyribosyl sugar moiety, and ‘y’ represents a 2′-OMe sugar moiety.
   Embodiment 26. The oligomeric compound of any of embodiments 1-25, wherein the modified oligonucleotide comprises 4 blocks of phosphodiester linkages.
   Embodiment 27. The oligomeric compound of any of embodiments 1-25, wherein the modified oligonucleotide comprises 3 blocks of phosphodiester linkages.
   Embodiment 28. The oligomeric compound of any of embodiments 1-25, wherein the modified oligonucleotide comprises 2 blocks of phosphodiester linkages.
   Embodiment 29. The oligomeric compound of any of embodiments 1-25, wherein the modified oligonucleotide comprises 1 block of phosphodiester linkages.
   Embodiment 30. The oligomeric compound of any of embodiments 1-29, wherein at least one block of phosphodiester linkages consists of 4 contiguous phosphodiester linkages.
   Embodiment 31. The oligomeric compound of any of embodiments 1-29, wherein at least one block of phosphodiester linkages consists of 3 contiguous phosphodiester linkages.
   Embodiment 32. The oligomeric compound of any of embodiments 1-29, wherein at least one block of phosphodiester linkages consists of 2 contiguous phosphodiester linkages.
   Embodiment 33. The oligomeric compound of any of embodiments 1-29, wherein each block of phosphodiester linkages consists of 1 or 2 contiguous phosphodiester linkages.
   Embodiment 34. The oligomeric compound of any of embodiments 1-29, wherein at least one block of phosphodiester linkages consists of 1 phosphodiester linkage.
   Embodiment 35. The oligomeric compound of any of embodiments 1-29, wherein each block of phosphodiester linkages consists of 1 phosphodiester linkage.
   Embodiment 36. The oligomeric compound of any of embodiments 1-35, wherein the 5′-terminal internucleoside linkage of the modified oligonucleotide is a phosphodiester linkage.
   Embodiment 37. The oligomeric compound of any of embodiments 1-36, wherein the 3′-terminal internucleoside linkage of the modified oligonucleotide is a phosphodiester linkage.
   Embodiment 38. The oligomeric compound of any of embodiments 1-37, wherein the 5′-penultimate internucleoside linkage of the modified oligonucleotide is a phosphodiester linkage.
   Embodiment 39. The oligomeric compound of any of embodiments 1-38, wherein the 3′-penultimate internucleoside linkage is a phosphodiester linkage.
   Embodiment 40. The oligomeric compound of any of embodiments 1-39, wherein the 4^{th} internucleoside linkage from the 5′-end of the modified oligonucleotide is a phosphodiester linkage.
   Embodiment 41. The oligomeric compound of any of embodiments 1-40, wherein at least one phosphodiester block is within the first 8 internucleoside linkages from the 5′-end of the modified oligonucleotide.
   Embodiment 42. The oligomeric compound of any of embodiments 1-40, wherein at least one phosphodiester block is within the first 6 internucleoside linkages from the 5′-end of the modified oligonucleotide.
   Embodiment 43. The oligomeric compound of any of embodiments 1-40, wherein at least one phosphodiester block is within the first 4 internucleoside linkages from the 5′-end of the modified oligonucleotide.
   Embodiment 44. The oligomeric compound of any of embodiments 1-40, wherein at least one phosphodiester block is within the first 2 internucleoside linkages from the 5′-end of the modified oligonucleotide.
   Embodiment 45. The oligomeric compound of any of embodiments 1-40, wherein each phosphodiester block is within the first 8 internucleoside linkages from the 5′-end of the modified oligonucleotide.
   Embodiment 46. The oligomeric compound of any of embodiments 1-40, wherein each phosphodiester block is within the first 6 internucleoside linkages from the 5′-end of the modified oligonucleotide.
   Embodiment 47. The oligomeric compound of any of embodiments 1-40, wherein each phosphodiester block is within the first 4 internucleoside linkages from the 5′-end of the modified oligonucleotide.
   Embodiment 48. The oligomeric compound of any of embodiments 1-40, wherein each phosphodiester block is within the first 2 internucleoside linkages from the 5′-end of the modified oligonucleotide.
   Embodiment 49. The oligomeric compound of any of embodiments 1-25, wherein the modified oligonucleotide has an internucleoside linkage motif (5′ to 3′) selected from: sososssssssssssss, ssosssssssssssoss, ssosssssosssssoss, ssosssosssosssoss, soossssssssssooss, sooosssssssssooss, sooossssssssoooss, sssssssooosssssss, ssossssssssssssss, ssssossssssssssss, ssssssossssssssss, ssssssssossssssss, ssssssssssossssss, ssssssssssssossss, ssssssssssssssoss, sossssssssssssoss, sosssssssssosssss, sosssssssosssssss, sosssssosssssssss, sosssosssssssssss, ssssosssssssssoss, ssssssosssssssoss, ssssssssosssssoss, ssssssssssosssoss, ssssssssssssososs, soossssssssssssss, sssoossssssssssss, sssssoossssssssss, sssssssoossssssss, sssssssssoossssss, sssssssssssoossss, sssssssssssssooss, sssssssoooossssss, ssoooosssssssssss, ssssoooosssssssss, ssssssssoooosssss, ssssssssssoooosss, sssssssssssooooss, ssssssooooossssss, ssssssoooooosssss, soooosssssssoooss, sssssooooooosssss, ssssssssssssssoss, ssssssssssssosss, sssssssssssssooss, ssssssssssssososs, sssssssssssosssss, sssssssssssososss, ssssssssssossosss, sssssssssosssssss, sssssssssosssosss, ssssssssosssssoss, ssssssssossssosss, sssssssosssssssss, sssssssoossssssss, sssssosssssssssss, sssosssssssssssss, sosssssssssssssss, sossssssossssssss, soossssssssssssss, ossssssssssssssssso, sssssssssssssssssoo, ssssssssssssssssoss, sssssssssssssssooss, ssssssssssssssososs, sssssssssosssssssss, sssssssssossssssoss, ssssssssoosssssssss, sosssssssssssssssss, sossssssssssssssoss, sosssssssosssssssss, sososssssssssssssss, soossssssssssssssss, sssssssssssssssssss, ssssssssssssssssso, ossssssssssssssssss, ssssssssssssososso, sssssssssssssssoss, sssssssssssssososs, ssssssssosssssssss, ssssssssossssssoss, sossssssssssssssss, sosssssssssssssoss, sossssssosssssssss, sosossssssssssssss, ssssssssssooooss, ssssssssoooossss, sssssssooossssss, ssssssoooossssss, ssssssooooosssss, sssssoooooosssss, sssssooooooossss, ssssoooossssssss, ssossssssssssoss, ssosssssossssoss, ssosssosssossoss, ssossossossososs, ssososososososss, ssoooossssssssss, soosssssssssooss, sooossssssssooss, sooosssssssoooss, soooossssssoooss, sssssssssooooss, ssssssssoooosss, ssssssooossssss, ssssssoooosssss, sssssooooosssss, sssssoooooossss, ssssoooosssssss, ssssooooooossss, sssosssosssosss, ssosssssssssoss, ssossossossosss, ssossossosososs, ssososososososs, ssoooosssssssss, soossssssssooss, sooosssssssooss, sooossssssoooss, and soooosssssoooss; wherein, ‘s’ represents a phosphorothioate internucleoside linkage and ‘o’ represents a phosphodiester internucleoside linkage.
   Embodiment 50. The oligomeric compound of embodiment 1, wherein the modified oligonucleotide has a sugar motif (5′ to 3′) selected from eeeeeeeeeeeeeeeeee or nnnnnnnnnnnnnnnnnn and an internucleoside linkage motif selected from sososssssssssssss, soossssssssssssss, sosssosssssssssss, sosssssosssssssss, sosssssssosssssss, sssoossssssssssss, sssssssoossssssss, sssssssssoossssss, and sssssssssssoossss.
   Embodiment 51. The oligomeric compound of embodiment 1, wherein the modified oligonucleotide has a sugar motif (5′ to 3′) selected from eeeeeeeeeeeeeeeeeeee and ennnnnnnnnnnnnnnnnne, and an internucleoside linkage motif of ossssssssssssssssso.
   Embodiment 52. The oligomeric compound of any of embodiments 1-51, wherein the modified oligonucleotide consists of 16 linked nucleosides.
   Embodiment 53. The oligomeric compound of any of embodiments 1-51, wherein the modified oligonucleotide consists of 17 linked nucleosides.
   Embodiment 54. The oligomeric compound of any of embodiments 1-51, wherein the modified oligonucleotide consists of 18 linked nucleosides.
   Embodiment 55. The oligomeric compound of any of embodiments 1-51, wherein the modified oligonucleotide consists of 19 linked nucleosides.
   Embodiment 56. The oligomeric compound of any of embodiments 1-51, wherein the modified oligonucleotide consists of 20 linked nucleosides.
   Embodiment 57. The oligomeric compound of any of embodiments 1-56 comprising a conjugate group.
   Embodiment 58. The oligomeric compound of embodiment 57, wherein a conjugate group is attached to the modified oligonucleotide at the 5′-end of the modified oligonucleotide.
   Embodiment 59. The oligomeric compound of embodiment 57 or embodiment 58, wherein the conjugate group is attached to the modified oligonucleotide at the 3′-end of the modified oligonucleotide.
   Embodiment 60. The oligomeric compound of any of embodiments 57-59, wherein the conjugate group comprises a lipid or lipophilic group, a carbohydrate, an antibody, a peptide, or a protein.
   Embodiment 61. The oligomeric compound of any of embodiments 1-60, wherein the nucleobase sequence of the modified oligonucleotide is complementary to a pre-mRNA.
   Embodiment 62. The oligomeric compound of embodiment 61, wherein the nucleobase sequence of the modified oligonucleotide is complementary to a splice modulation site of a pre-mRNA.
   Embodiment 63. The oligomeric compound of embodiment 61 or embodiment 62, wherein the modified oligonucleotide is 80% complementary to the pre-mRNA.
   Embodiment 64. The oligomeric compound of embodiment 61 or embodiment 62, wherein the modified oligonucleotide is 90% complementary to the pre-mRNA.
   Embodiment 65. The oligomeric compound of embodiment 61 or embodiment 62, wherein the modified oligonucleotide is 95% complementary to the pre-mRNA.
   Embodiment 66. The oligomeric compound of embodiment 61 or embodiment 62, wherein the modified oligonucleotide is 100% complementary to the pre-mRNA.
   Embodiment 67. The oligomeric compound of any of embodiments 61-66, wherein the pre-mRNA is expressed in the CNS.
   Embodiment 68. The oligomeric compound of any of embodiments 61-67, wherein the pre-mRNA is expressed in muscle.
   Embodiment 69. The oligomeric compound of any of embodiments 61-68, wherein the pre-mRNA is selected from SMN2, SCN1A, DMD, APP, ATXN3, SmgGDS, PK-M, PK-M1, PK-M2, MAPT, LRP8, CLN3, IKBKAP, USH1C, LMNA, dysferlin, TGFBR1, C5, PKD1, ATXN1, ATXN7, CACNA1A, HTT, ATN1, TBP, or IL-1RAP.
   Embodiment 70. The oligomeric compound of any of embodiments 61-68, wherein the pre-mRNA is other than SMN2, DMD, or SCN1A.
   Embodiment 71. The oligomeric compound of any of embodiments 1-70, wherein the modified oligonucleotide has an internucleoside linkage motif (5′ to 3′) other than: soooosssssssoooo, sooossssssssooos, sooosssssssssoos, sooosssssssssssooos, soosssssssssooss, and sssssssssssoos; wherein, ‘s’ represents a phosphorothioate internucleoside linkage and ‘o’ represents a phosphodiester internucleoside linkage.
   Embodiment 72. An oligomeric compound comprising a modified oligonucleotide consisting of 16-20 linked nucleosides, wherein:
[0067] each nucleoside of the modified oligonucleotide is either a sugar-modified nucleoside or a DNA nucleoside, provided that not more than 4 nucleosides are DNA nucleosides; and
[0068] each internucleoside linkage is either a phosphorothioate internucleoside linkage or a phosphodiester internucleoside linkage.
   Embodiment 73. The oligomeric compound of embodiment 72, wherein the modified oligonucleotide comprises 1, 2, 3, 4, 5, 6, 7, 8, 9, 10, 11, 12, 13, 14, 15, 16, 17, 18, 19, or 20 sugar-modified nucleosides.
   Embodiment 74. The oligomeric compound of embodiment 72 or embodiment 73, wherein the modified oligonucleotide has an internucleoside linkage motif (5′ to 3′) selected from: sososssssssssssss, ssosssssssssssoss, ssosssssosssssoss, ssosssosssosssoss, soossssssssssooss, sooosssssssssooss, sooossssssssoooss, sssssssooosssssss, ssossssssssssssss, ssssossssssssssss, ssssssossssssssss, ssssssssossssssss, ssssssssssossssss, ssssssssssssossss, ssssssssssssssoss, sossssssssssssoss, sosssssssssosssss, sosssssssosssssss, sosssssosssssssss, sosssosssssssssss, ssssosssssssssoss, ssssssosssssssoss, ssssssssosssssoss, ssssssssssosssoss, ssssssssssssososs, soossssssssssssss, sssoossssssssssss, sssssoossssssssss, sssssssoossssssss, sssssssssoossssss, sssssssssssoossss, sssssssssssssooss, sssssssoooossssss, ssoooosssssssssss, ssssoooosssssssss, ssssssssoooosssss, ssssssssssoooosss, sssssssssssooooss, ssssssooooossssss, ssssssoooooosssss, soooosssssssoooss, sssssooooooosssss, ssssssssssssssoss, ssssssssssssosss, sssssssssssssooss, ssssssssssssososs, sssssssssssosssss, sssssssssssososss, ssssssssssossosss, sssssssssosssssss, sssssssssosssosss, ssssssssosssssoss, ssssssssossssosss, sssssssosssssssss, sssssssoossssssss, sssssosssssssssss, sssosssssssssssss, sosssssssssssssss, sossssssossssssss, soossssssssssssss, ossssssssssssssssso, sssssssssssssssssoo, ssssssssssssssssoss, sssssssssssssssooss, ssssssssssssssososs, sssssssssosssssssss, sssssssssossssssoss, ssssssssoosssssssss, sosssssssssssssssss, sossssssssssssssoss, sosssssssosssssssss, sososssssssssssssss, soossssssssssssssss, sssssssssssssssssss, ssssssssssssssssso, ossssssssssssssssss, ssssssssssssososso, sssssssssssssssoss, sssssssssssssososs, ssssssssosssssssss, ssssssssossssssoss, sossssssssssssssss, sosssssssssssssoss, sossssssosssssssss, sosossssssssssssss, ssssssssssooooss, ssssssssoooossss, sssssssooossssss, ssssssoooossssss, ssssssooooosssss, sssssoooooosssss, sssssooooooossss, ssssoooossssssss, ssossssssssssoss, ssosssssossssoss, ssosssosssossoss, ssossossossososs, ssososososososss, ssoooossssssssss, soosssssssssooss, sooossssssssooss, sooosssssssoooss, soooossssssoooss, sssssssssooooss, ssssssssoooosss, ssssssooossssss, ssssssoooosssss, sssssooooosssss, sssssoooooossss, ssssoooosssssss, ssssooooooossss, sssosssosssosss, ssosssssssssoss, ssossossossosss, ssossossosososs, ssososososososs, ssoooosssssssss, soossssssssooss, sooosssssssooss, sooossssssoooss, and soooosssssoooss; wherein, ‘s’ represents a phosphorothioate internucleoside linkage and ‘o’ represents a phosphodiester internucleoside linkage.
   Embodiment 75. The oligomeric compound of embodiment 74 having a sugar motif (5′ to 3′) selected from: eeeeeeeeeeeeeeeeeeee, eeeeeeeeeeeeeeeeeee, eeeeeeeeeeeeeeeeee, eeeeeeeeeeeeeeeee, eeeeeeeeeeeeeeee, nnnnnnnnnnnnnnnn, nnnnnnnnnnnnnnnnn, nnnnnnnnnnnnnnnnnn, nnnnnnnnnnnnnnnnnnn, nnnnnnnnnnnnnnnnnnnn, nennnnneneennnnnnn, nnnnnnnnnnnnenneen, nennnnneneenenneen, nnnnnnnnnnnnnnnnnne, nnnnnnnnnnnnnnnnnnd, nnnnnnnnnnnnnnnnnny, nnnnnnnnnnnnnnnnnndd, nnnnnnnnnnnnnnnnnned, nnnnnnnnnnnnnnnnnnde, nnnnnnnnnnnnnnnnnnee, eeeeeeeeeeeeeeeeeedd, eeeeeeeeeeeeeeeeeeed, eeeeeeeeeeeeeeeeeede, nnnnnnnnnnnnnnnnnnd, nnnnnnnnnnnnnnnnnne, eeeeeeeeeeeeeeeeeed, keekeekeekeekeeeek, keeekeeekeeekeeeek, keeeeekeeeeekeeeek, keeeeeeekeeeeeeeek, keeeeeeeeeeeeeeeek, eeekeekeekeekeekek, eeekeekeekeekeekee, eeeeeekeekeekeekee, eeeeeekeekeekeeeee, eeeeeekeeeeekeeeee, keekeekeekeeeeeeee, eeeeeeeekeekeekeek, keekeekeeeeeeeeeee, eeeeeeeeeeekeekeek, keekeeeeeeeeeeeeee, eeeeeeeeeeeeeekeek, keekeekeekeekeeek, keeekeeekeeekeeek, keeeekeeeeekeeeek, keeeeeeekeeeeeeek, keeeeeeeeeeeeeeek, eekeekeekeekeekek, eekeekeekeekeekee, eeeeekeekeekeekee, eeeeekeekeekeeeee, eeeeekeeeeekeeeee, keekeekeekeeeeeee, eeeeeeekeekeekeek, keekeekeeeeeeeeee, eeeeeeeeeekeekeek, keekeeeeeeeeeeeee, eeeeeeeeeeeeekeek, keekeekeekeekeek, keeekeeekeeekeek, keeeekeeeekeeeek, keeeeeeekeeeeeek, keeeeeeeeeeeeeek, kekeekeekeekeeke, eekeekeekeekeeke, eeeeekeekeekeeke, eeeeekeekeekeeee, eeeeekeeeeekeeee, keekeekeekeeeeee, eeeeeekeekeekeek, keekeekeeeeeeeee, eeeeeeeeekeekeek, keekeeeeeeeeeeee, eeeeeeeeeeeekeek, eeeeeeeeeeeeeeeeeed, eeeeeeeeeeeeeeeeeey, ennnnnnnnnnnnnnnnnn, and ennnnnnnnnnnnnnnnnne; wherein ‘e’ represents a 2′-MOE sugar moiety, ‘n’ represents a 2′-NMA sugar moiety, ‘k’ represents a cEt sugar moiety, ‘d’ represents a 2′-β-D-deoxyribosyl sugar moiety, and ‘y’ represents a 2′-OMe sugar moiety.
   Embodiment 76. The oligomeric compound of embodiment 73 or embodiment 74, wherein the modified oligonucleotide has a sugar motif (5′ to 3′) selected from eeeeeeeeeeeeeeeeee or nnnnnnnnnnnnnnnnnn and an internucleoside linkage motif selected from sososssssssssssss, soossssssssssssss, sosssosssssssssss, sosssssosssssssss, sosssssssosssssss, sssoossssssssssss, sssssssoossssssss, sssssssssoossssss, and sssssssssssoossss.
   Embodiment 77. The oligomeric compound of embodiment 73 or embodiment 74, wherein the modified oligonucleotide has a sugar motif (5′ to 3′) selected from eeeeeeeeeeeeeeeeeeee and ennnnnnnnnnnnnnnnnne, and an internucleoside linkage motif of ossssssssssssssssso.
   Embodiment 78. The oligomeric compound of any of embodiments 72-77 comprising a conjugate group.
   Embodiment 79. The oligomeric compound of embodiment 78, wherein a conjugate group is attached to the modified oligonucleotide at the 5′-end of the modified oligonucleotide.
   Embodiment 80. The oligomeric compound of embodiment 78 or embodiment 79, wherein the conjugate group is attached to the modified oligonucleotide at the 3′-end of the modified oligonucleotide.
   Embodiment 81. The oligomeric compound of any of embodiments 78-80, wherein the conjugate group comprises a lipid or lipophilic group, a carbohydrate, an antibody, a peptide, or a protein.
   Embodiment 82. The oligomeric compound of any of embodiments 73-81, wherein the nucleobase sequence of the modified oligonucleotide is complementary to a pre-mRNA.
   Embodiment 83. The oligomeric compound of embodiment 82, wherein the nucleobase sequence of the modified oligonucleotide is complementary to a splice modulation site of a pre-mRNA.
   Embodiment 84. The oligomeric compound of embodiment 82 or embodiment 83, wherein the modified oligonucleotide is 80%, 90%, 95%, or 100% complementary to the pre-mRNA.
   Embodiment 85. The oligomeric compound of any of embodiments 82-84, wherein the pre-mRNA is expressed in the CNS.
   Embodiment 86. The oligomeric compound of any of embodiments 82-84, wherein the pre-mRNA is expressed in muscle.
   Embodiment 87. The oligomeric compound of any of embodiments 82-84, wherein the pre-mRNA is selected from SMN2, SCN1A, DMD, APP, ATXN3, SmgGDS, PK-M, PK-M1, PK-M2, MAPT, LRP8, CLN3, IKBKAP, USH1C, LMNA, dysferlin, TGFBR1, C5, PKD1, ATXN1, ATXN7, CACNA1A, HTT, ATN1, TBP, or IL-1RAP.
   Embodiment 88. The oligomeric compound of any of embodiments 82-84, wherein the pre-mRNA is other than SMN2, DMD, or SCN1A.
   Embodiment 89. The oligomeric compound of any of embodiments 72-88, having an internucleoside linkage motif (5′ to 3′) other than: soooosssssssoooo, sooossssssssooos, sooosssssssssoos, sooosssssssssssooos, soosssssssssooss, and sssssssssssoos; wherein, ‘s’ represents a phosphorothioate internucleoside linkage and ‘o’ represents a phosphodiester internucleoside linkage.
   Embodiment 90. A pharmaceutical composition comprising an oligomeric compound of any of embodiments 1-89 and a pharmaceutically acceptable diluent.
   Embodiment 91. The pharmaceutical composition of embodiment 90, wherein the pharmaceutically acceptable diluent is selected from water, saline, PBS, and artificial CSF.
   Embodiment 92. A method comprising contacting a cell with the oligomeric compound of any of embodiments 1-89.
   Embodiment 93. A method of modulating splicing of a pre-mRNA in a cell comprising contacting the cell with an oligomeric compound of any of embodiments 1-89 and thereby modulating splicing of the pre-mRNA in the cell.
   Embodiment 94. The method of embodiment 93, wherein the modulating of the pre-mRNA is inducing exon skipping in the pre-mRNA.
   Embodiment 95. The method of embodiment 93, wherein the modulating of the pre-mRNA is inducing intron retention.
   Embodiment 96. The method of embodiment 93, wherein the modulating of the pre-mRNA results on alternative splicing.
   Embodiment 97. The method of any embodiments 92-96, wherein the resulting mRNA is a substrate for nonsense mediated decay.
   Embodiment 98. The method of any of embodiments 92-97, wherein in the cell is in an animal.
   Embodiment 99. A method comprising administering to an animal the pharmaceutical composition of embodiment 90 or embodiment 91.
   Embodiment 100. The method of embodiment 99, wherein the animal has a disease or disorder associated with altered splicing of a pre-mRNA.
   Embodiment 101. A method of treating a disease or condition in an animal comprising administering to an animal the pharmaceutical composition of embodiment 90 or embodiment 91 and thereby treating the disease or condition in the animal.
   Embodiment 102. The method of embodiment 101, wherein the disease or condition is associated with altered splicing of a pre-mRNA.
   Embodiment 103. The method of embodiment 101, wherein the disease or condition is not associated with altered splicing of a pre-mRNA.
   Embodiment 104. The method of any of embodiments 98-103, wherein the animal is a human.
   Embodiment 105. The method of any of embodiments 99-104, wherein the pharmaceutical composition is administered to the CNS.
   Embodiment 106. The method of any of embodiments 99-104, wherein the pharmaceutical composition is administered systemically.
   Embodiment 107. An oligomeric compound of any of embodiments 1-89 for use in modulating splicing.
   Embodiment 108. An oligomeric compound of any of embodiments 1-89 for use in therapy.

### Certain Oligonucleotides

[0069] In certain embodiments, provided herein are oligomeric compounds comprising oligonucleotides, which consist of linked nucleosides. Oligonucleotides may be unmodified oligonucleotides (RNA or DNA) or may be modified oligonucleotides. Modified oligonucleotides comprise at least one modification relative to unmodified RNA or DNA.

[0070] That is, modified oligonucleotides comprise at least one modified nucleoside (comprising a modified sugar moiety and/or a modified nucleobase) and/or at least one modified internucleoside linkage.

[0071] A. Certain Modified Nucleosides

[0072] Modified nucleosides comprise a modified sugar moiety or a modified nucleobase or both a modified sugar moiety and a modified nucleobase.

[0073] 1. Certain Sugar Moieties

[0074] In certain embodiments, modified sugar moieties are non-bicyclic modified sugar moieties. In certain embodiments, modified sugar moieties are bicyclic or tricyclic sugar moieties. In certain embodiments, modified sugar moieties are sugar surrogates. Such sugar surrogates may comprise one or more substitutions corresponding to those of other types of modified sugar moieties.

[0075] In certain embodiments, modified sugar moieties are non-bicyclic modified sugar moieties comprising a furanosyl ring with one or more substituent groups none of which bridges two atoms of the furanosyl ring to form a bicyclic structure. Such non bridging substituents may be at any position of the furanosyl, including but not limited to substituents at the 2′, 4′, and/or 5′ positions. In certain embodiments one or more non-bridging substituent of non-bicyclic modified sugar moieties is branched. Examples of 2′-substituent groups suitable for non-bicyclic modified sugar moieties include but are not limited to: 2′-F, 2′-OCH₃ (“OMe” or “O-methyl”), and 2′-O(CH₂)₂OCH₃ (“MOE” or “O-methoxyethyl”), and 2′-O—N-alkyl acetamide, e.g., 2′-O—N-methyl acetamide (“NMA”), 2′-O—N-dimethyl acetamide, 2′-O—N-ethyl acetamide, or 2′-O—N-propyl acetamide. For example, see U.S. Pat. No. 6,147,200, Prakash et al., 2003, Org. Lett., 5, 403-6. A “2′-O—N-methyl acetamide nucleoside” or “2′-NMA nucleoside” is shown below:

[chemical structure]

[0076] In certain embodiments, 2′-substituent groups are selected from among: halo, allyl, amino, azido, SH, CN, OCN, CF₃, OCF₃, O—C₁-C₁₀ alkoxy, O—C₁-C₁₀ substituted alkoxy, O—C₁-C₁₀ alkyl, O—C₁-C₁₀ substituted alkyl, S-alkyl, N(Rₘ)-alkyl, O-alkenyl, S-alkenyl, N(Rₘ)-alkenyl, O-alkynyl, S-alkynyl, N(Rₘ)-alkynyl, O-alkylenyl-O-alkyl, alkynyl, alkaryl, aralkyl, O-alkaryl, O-aralkyl, O(CH₂)₂SCH₃, O(CH₂)₂ON(Rₘ)(Rₙ) or OCH₂C(═O)—N(Rₘ)(Rₙ), where each Rₘ and Rₙ is, independently, H, an amino protecting group, or substituted or unsubstituted C₁-C₁₀ alkyl, and the 2′-substituent groups described in Cook et al., U.S. Pat. No. 6,531,584; Cook et al., U.S. Pat. No. 5,859,221; and Cook et al., U.S. Pat. No. 6,005,087. Certain embodiments of these 2′-substituent groups can be further substituted with one or more substituent groups independently selected from among: hydroxyl, amino, alkoxy, carboxy, benzyl, phenyl, nitro (NO₂), thiol, thioalkoxy, thioalkyl, halogen, alkyl, aryl, alkenyl and alkynyl. Examples of 4′-substituent groups suitable for non-bicyclic modified sugar moieties include but are not limited to alkoxy (e.g., methoxy), alkyl, and those described in Manoharan et al., WO 2015/106128. Examples of 5′-substituent groups suitable for non-bicyclic modified sugar moieties include but are not limited to: 5′-methyl (R or S), 5′-vinyl, and 5′-methoxy. In certain embodiments, non-bicyclic modified sugar moieties comprise more than one non-bridging sugar substituent, for example, 2′-F-5′-methyl sugar moieties and the modified sugar moieties and modified nucleosides described in Migawa et al., WO 2008/101157 and Rajeev et al., US2013/0203836.

[0077] In certain embodiments, a 2′-substituted non-bicyclic modified nucleoside comprises a sugar moiety comprising a non-bridging 2′-substituent group selected from: F, NH₂, N₃, OCF₃, OCH₃, O(CH₂)₃NH₂, CH₂CH═CH₂, OCH₂CH═CH₂, OCH₂CH₂OCH₃, O(CH₂)₂SCH₃, O(CH₂)₂ON(Rₘ)(Rₙ), O(CH₂), ON(CH₃)₂, O(CH₂)₂O(CH₂)₂N(CH₃)₂, and N-substituted acetamide (OCH₂C(═O)—N(Rₘ)(Rₙ)), where each Rₘ and Rₙ is, independently, H, an amino protecting group, or substituted or unsubstituted C₁-C₁₀ alkyl, e.g., for example, OCH₂C(═O)—N(H)CH₃ (“NMA”).

[0078] In certain embodiments, a 2′-substituted non-bicyclic modified nucleoside comprises a sugar moiety comprising a non-bridging 2′-substituent group selected from: F, OCF₃, OCH₃, OCH₂CH₂OCH₃, O(CH₂)₂SCH₃, O(CH₂)₂ON(CH₃)₂, O(CH₂)₂O(CH₂)₂N(CH₃)₂, and OCH₂C(═O)—N(H)CH₃ (“NMA”).

[0079] In certain embodiments, a 2′-substituted non-bicyclic modified nucleoside comprises a sugar moiety comprising a non-bridging 2′-substituent group selected from: F, OCH₃, OCH₂CH₂OCH₃, and OCH2C(═O)—N(H)CH3.

[0080] Certain modified sugar moieties comprise a substituent that bridges two atoms of the furanosyl ring to form a second ring, resulting in a bicyclic sugar moiety. In certain such embodiments, the bicyclic sugar moiety comprises a bridge between the 4′ and the 2′ furanose ring atoms. Examples of such 4′ to 2′ bridging sugar substituents include but are not limited to: 4′-CH₂-2′, 4′-(CH₂)₂-2′, 4′-(CH₂)₃-2′, 4′-CH₂—O-2′ (“LNA”), 4′-CH₂—S-2′, 4′-(CH₂)₂—O-2′ (“ENA”), 4′-CH(CH₃)—O-2′ (referred to as “constrained ethyl” or “cEt”), 4′-CH₂—O—CH₂-2′, 4′-CH₂—N(R)-2′, 4′-CH(CH₂OCH₃)—O-2′ (“constrained MOE” or “cMOE”) and analogs thereof (see, e.g., Seth et al., U.S. Pat. No. 7,399,845, Bhat et al., U.S. Pat. No. 7,569,686, Swayze et al., U.S. Pat. No. 7,741,457, and Swayze et al., U.S. Pat. No. 8,022,193), 4′-C(CH₃)(CH₃)—O-2′ and analogs thereof (see, e.g., Seth et al., U.S. Pat. No. 8,278,283), 4′-CH₂—N(OCH₃)-2′ and analogs thereof (see, e.g., Prakash et al., U.S. Pat. No. 8,278,425), 4′-CH₂—O—N(CH₃)-2′ (see, e.g., Allerson et al., U.S. Pat. No. 7,696,345 and Allerson et al., U.S. Pat. No. 8,124,745), 4′-CH₂—C(H)(CH₃)-2′ (see, e.g., Zhou, et al., J. Org. Chem., 2009, 74, 118-134), 4′-CH₂—C(═CH₂)-2′ and analogs thereof (see e.g., Seth et al., U.S. Pat. No. 8,278,426), 4′-C(RₐR_{b})—N(R)—O-2′, 4′-C(RₐR_{b})—O—N(R)-2′, 4′-CH₂—O—N(R)-2′, and 4′-CH₂—N(R)—O- 2′, wherein each R, Rₐ, and R_{b} is, independently, H, a protecting group, or C₁-C₁₂ alkyl (see, e.g. Imanishi et al., U.S. Pat. No. 7,427,672).

[0081] In certain embodiments, such 4′ to 2′ bridges independently comprise from 1 to 4 linked groups independently selected from: —[C(Rₐ)(R_{b})]ₙ—, —[C(Rₐ)(R_{b})]ₙO—, —C(Rₐ)═C(R_{b})—, —C(Rₐ)═N—, —C(═NRₐ)—, —C(═O)—, —C(═S)—, —O—, —Si(Rₐ)₂—, —S(═O)ₓ—, and —N(Rₐ)—;

[0082] wherein:

[0083] x is 0, 1, or 2;

[0084] n is 1, 2, 3, or 4;

[0085] each Rₐ and R_{b} is, independently, H, a protecting group, hydroxyl, C₁-C₁₂ alkyl, substituted C₁-C₁₂ alkyl, C₂-C₁₂ alkenyl, substituted C₂-C₁₂ alkenyl, C₂-C₁₂ alkynyl, substituted C₂-C₁₂ alkynyl, C₅-C₂₀ aryl, substituted C₅-C₂₀ aryl, heterocycle radical, substituted heterocycle radical, heteroaryl, substituted heteroaryl, C₅-C₇ alicyclic radical, substituted C₅-C₇ alicyclic radical, halogen, OJ₁, NJ₁J₂, SJ₁, N₃, COOJ₁, acyl (C(═O)—H), substituted acyl, CN, sulfonyl (S(═O)₂-J₁), or sulfoxyl (S(═O)-J₁); and

[0086] each J₁ and J₂ is, independently, H, C₁-C₁₂ alkyl, substituted C₁-C₁₂ alkyl, C₂-C₁₂ alkenyl, substituted C₂-C₁₂ alkenyl, C₂-C₁₂ alkynyl, substituted C₂-C₁₂ alkynyl, C₅-C₂₀ aryl, substituted C₅-C₂₀ aryl, acyl (C(═O)—H), substituted acyl, a heterocycle radical, a substituted heterocycle radical, C₁-C₁₂ aminoalkyl, substituted C₁-C₁₂ aminoalkyl, or a protecting group.

[0087] Additional bicyclic sugar moieties are known in the art, see, for example: Freier et al., Nucleic Acids Research, 1997, 25(22), 4429-4443, Albaek et al., J. Org. Chem., 2006, 71, 7731-7740, Singh et al., Chem. Commun., 1998, 4, 455-456; Koshkin et al., Tetrahedron, 1998, 54, 3607-3630; Kumar et al., Bioorg. Med. Chem. Lett., 1998, 8, 2219-2222; Singh et al., J. Org. Chem., 1998, 63, 10035-10039; Srivastava et al., J. Am. Chem. Soc., 2007, 129, 8362-8379; Wengel et al., U.S. Pat. No. 7,053,207; Imanishi et al., U.S. Pat. No. 6,268,490; Imanishi et al. U.S. Pat. No. 6,770,748; Imanishi et al., U.S. RE44,779; Wengel et al., U.S. Pat. No. 6,794,499; Wengel et al., U.S. Pat. No. 6,670,461; Wengel et al., U.S. Pat. No. 7,034,133; Wengel et al., U.S. Pat. No. 8,080,644; Wengel et al., U.S. Pat. No. 8,034,909; Wengel et al., U.S. Pat. No. 8,153,365; Wengel et al., U.S. Pat. No. 7,572,582; and Ramasamy et al., U.S. Pat. No. 6,525,191; Torsten et al., WO 2004/106356; Wengel et al., WO 1999/014226; Seth et al., WO 2007/134181; Seth et al., U.S. Pat. No. 7,547,684; Seth et al., U.S. Pat. No. 7,666,854; Seth et al., U.S. Pat. No. 8,088,746; Seth et al., U.S. Pat. No. 7,750,131; Seth et al., U.S. Pat. No. 8,030,467; Seth et al., U.S. Pat. No. 8,268,980; Seth et al., U.S. Pat. No. 8,546,556; Seth et al., U.S. Pat. No. 8,530,640; Migawa et al., U.S. Pat. No. 9,012,421; Seth et al., U.S. Pat. No. 8,501,805; and U.S. Patent Publication Nos. Allerson et al., US2008/0039618 and Migawa et al., US2015/0191727.

[0088] In certain embodiments, bicyclic sugar moieties and nucleosides incorporating such bicyclic sugar moieties are further defined by isomeric configuration. For example, an LNA nucleoside (described herein) may be in the α-L configuration or in the β-D configuration.

[chemical structure]

α-L-methyleneoxy (4′-CH₂—O-2′) or α-L-LNA bicyclic nucleosides have been incorporated into oligonucleotides that showed antisense activity (Frieden et al., Nucleic Acids Research, 2003, 21, 6365-6372). Herein, general descriptions of bicyclic nucleosides include both isomeric configurations. When the positions of specific bicyclic nucleosides (e.g., LNA or cEt) are identified in exemplified embodiments herein, they are in the β-D configuration, unless otherwise specified.

[0089] In certain embodiments, modified sugar moieties comprise one or more non-bridging sugar substituent and one or more bridging sugar substituent (e.g., 5′-substituted and 4′-2′ bridged sugars).

[0090] In certain embodiments, modified sugar moieties are sugar surrogates. In certain such embodiments, the oxygen atom of the sugar moiety is replaced, e.g., with a sulfur, carbon or nitrogen atom. In certain such embodiments, such modified sugar moieties also comprise bridging and/or non-bridging substituents as described herein. For example, certain sugar surrogates comprise a 4′-sulfur atom and a substitution at the 2′-position (see, e.g., Bhat et al., U.S. Pat. No. 7,875,733 and Bhat et al., U.S. Pat. No. 7,939,677) and/or the 5′ position.

[0091] In certain embodiments, sugar surrogates comprise rings having other than 5 atoms. For example, in certain embodiments, a sugar surrogate comprises a six-membered tetrahydropyran (“THP”). Such tetrahydropyrans may be further modified or substituted. Nucleosides comprising such modified tetrahydropyrans include but are not limited to hexitol nucleic acid (“HNA”), anitol nucleic acid (“ANA”), manitol nucleic acid (“NINA”) (see, e.g., Leumann, C J. Bioorg. & Med. Chem. 2002, 10, 841-854), fluoro HNA:

[chemical structure]

(“F-HNA”, see e.g. Swayze et al., U.S. Pat. No. 8,088,904; Swayze et al., U.S. Pat. No. 8,440,803; Swayze et al., U.S. Pat. No. 8,796,437; and Swayze et al., U.S. Pat. No. 9,005,906; F-HNA can also be referred to as a F-THP or 3′-fluoro tetrahydropyran), and nucleosides comprising additional modified THP compounds having the formula:

[chemical structure]

wherein, independently, for each of said modified THP nucleoside:

[0092] Bx is a nucleobase moiety;

[0093] T₃ and T₄ are each, independently, an internucleoside linking group linking the modified THP nucleoside to the remainder of an oligonucleotide or one of T₃ and T₄ is an internucleoside linking group linking the modified THP nucleoside to the remainder of an oligonucleotide and the other of T₃ and T₄ is H, a hydroxyl protecting group, a linked conjugate group, or a 5′ or 3′-terminal group;

q₁, q₂, q₃, q₄, q₅, q₆ and q₇ are each, independently, H, C₁-C₆ alkyl, substituted C₁-C₆ alkyl, C₂-C₆ alkenyl, substituted C₂-C₆ alkenyl, C₂-C₆ alkynyl, or substituted C₂-C₆ alkynyl; and

[0094] each of R₁ and R₂ is independently selected from among: hydrogen, halogen, substituted or unsubstituted alkoxy, NJ₁J₂, SJ₁, N₃, OC(═X)J₁, OC(═X)NJ₁J₂, NJ₃C(═X)NJ₁J₂, and CN, wherein X is O, S or NJ₁, and each J₁, J₂, and J₃ is, independently, H or C₁-C₆ alkyl.

[0095] In certain embodiments, modified THP nucleosides are provided wherein q₁, q₂, q₃, q₄, q₅, q₆ and q₇ are each H. In certain embodiments, at least one of q₁, q₂, q₃, q₄, q₅, q₆ and q₇ is other than H. In certain embodiments, at least one of q₁, q₂, q₃, q₄, q₅, q₆ and q₇ is methyl. In certain embodiments, modified THP nucleosides are provided wherein one of R₁ and R₂ is F. In certain embodiments, R₁ is F and R₂ is H, in certain embodiments, R₁ is methoxy and R₂ is H, and in certain embodiments, R₁ is methoxyethoxy and R₂ is H.

[0096] In certain embodiments, sugar surrogates comprise rings having more than 5 atoms and more than one heteroatom. For example, nucleosides comprising morpholino sugar moieties and their use in oligonucleotides have been reported (see, e.g., Braasch et al., Biochemistry, 2002, 41, 4503-4510 and Summerton et al., U.S. Pat. No. 5,698,685; Summerton et al., U.S. Pat. No. 5,166,315; Summerton et al., U.S. Pat. No. 5,185,444; and Summerton et al., U.S. Pat. No. 5,034,506). As used here, the term “morpholino” means a sugar surrogate having the following structure:

[chemical structure]

In certain embodiments, morpholinos may be modified, for example by adding or altering various substituent groups from the above morpholino structure. Such sugar surrogates are referred to herein as “modified morpholinos.”

[0097] In certain embodiments, sugar surrogates comprise acyclic moieties. Examples of nucleosides and oligonucleotides comprising such acyclic sugar surrogates include but are not limited to: peptide nucleic acid (“PNA”), acyclic butyl nucleic acid (see, e.g., Kumar et al., Org. Biomol. Chem., 2013, 11, 5853-5865), and nucleosides and oligonucleotides described in Manoharan et al., WO2011/133876.

[0098] Many other bicyclic and tricyclic sugar and sugar surrogate ring systems are known in the art that can be used in modified nucleosides.

[0099] 2. Certain Modified Nucleobases

[0100] In certain embodiments, modified oligonucleotides comprise one or more nucleosides comprising an unmodified nucleobase. In certain embodiments, modified oligonucleotides comprise one or more nucleosides comprising a modified nucleobase. In certain embodiments, modified oligonucleotides comprise one or more nucleosides that does not comprise a nucleobase, referred to as an abasic nucleoside.

[0101] In certain embodiments, modified nucleobases are selected from: 5-substituted pyrimidines, 6-azapyrimidines, alkyl or alkynyl substituted pyrimidines, alkyl substituted purines, and N-2, N-6 and 0-6 substituted purines. In certain embodiments, modified nucleobases are selected from: 2-aminopropyladenine, 5-hydroxymethyl cytosine, xanthine, hypoxanthine, 2-aminoadenine, 6-N-methylguanine, 6-N-methyladenine, 2-propyl adenine, 2-thiouracil, 2-thiothymine and 2-thiocytosine, 5-propynyl (—C≡C—CH₃) uracil, 5-propynylcytosine, 6-azouracil, 6-azocytosine, 6-azothymine, 5-ribosyluracil (pseudouracil), 4-thiouracil, 8-halo, 8-amino, 8-thiol, 8-thioalkyl, 8-hydroxyl, 8-aza and other 8-substituted purines, 5-halo, particularly 5-bromo, 5-trifluoromethyl, 5-halouracil, and 5-halocytosine, 7-methylguanine, 7-methyladenine, 2-F-adenine, 2-aminoadenine, 7-deazaguanine, 7-deazaadenine, 3-deazaguanine, 3-deazaadenine, 6-N-benzoyladenine, 2-N-isobutyrylguanine, 4-N-benzoylcytosine, 4-N-benzoyluracil, 5-methyl 4-N-benzoylcytosine, 5-methyl 4-N-benzoyluracil, universal bases, hydrophobic bases, promiscuous bases, size-expanded bases, and fluorinated bases. Further modified nucleobases include tricyclic pyrimidines, such as 1,3-diazaphenoxazine-2-one, 1,3-diazaphenothiazine-2-one and 9-(2-aminoethoxy)-1,3-diazaphenoxazine-2-one (G-clamp). Modified nucleobases may also include those in which the purine or pyrimidine base is replaced with other heterocycles, for example 7-deazaadenine, 7-deazaguanosine, 2-aminopyridine and 2-pyridone. Further nucleobases include those disclosed in Merigan et al., U.S. Pat. No. 3,687,808, those disclosed in The Concise Encyclopedia Of Polymer Science And Engineering, Kroschwitz, J. I., Ed., John Wiley & Sons, 1990, 858-859; Englisch et al., Angewandte Chemie, International Edition, 1991, 30, 613; Sanghvi, Y. S., Chapter 15, Antisense Research and Applications, Crooke, S. T. and Lebleu, B., Eds., CRC Press, 1993, 273-288; and those disclosed in Chapters 6 and 15, Antisense Drug Technology, Crooke S. T., Ed., CRC Press, 2008, 163-166 and 442-443.

[0102] Publications that teach the preparation of certain of the above noted modified nucleobases as well as other modified nucleobases include without limitation, Manoharan et al., US2003/0158403; Manoharan et al., US2003/0175906; Dinh et al., U.S. Pat. No. 4,845,205; Spielvogel et al., U.S. Pat. No. 5,130,302; Rogers et al., U.S. Pat. No. 5,134,066; Bischofberger et al., U.S. Pat. No. 5,175,273; Urdea et al., U.S. Pat. No. 5,367,066; Benner et al., U.S. Pat. No. 5,432,272; Matteucci et al., U.S. Pat. No. 5,434,257; Gmeiner et al., U.S. Pat. No. 5,457,187; Cook et al., U.S. Pat. No. 5,459,255; Froehler et al., U.S. Pat. No. 5,484,908; Matteucci et al., U.S. Pat. No. 5,502,177; Hawkins et al., U.S. Pat. No. 5,525,711; Haralambidis et al., U.S. Pat. No. 5,552,540; Cook et al., U.S. Pat. No. 5,587,469; Froehler et al., U.S. Pat. No. 5,594,121; Switzer et al., U.S. Pat. No. 5,596,091; Cook et al., U.S. Pat. No. 5,614,617; Froehler et al., U.S. Pat. No. 5,645,985; Cook et al., U.S. Pat. No. 5,681,941; Cook et al., U.S. Pat. No. 5,811,534; Cook et al., U.S. Pat. No. 5,750,692; Cook et al., U.S. Pat. No. 5,948,903; Cook et al., U.S. Pat. No. 5,587,470; Cook et al., U.S. Pat. No. 5,457,191; Matteucci et al., U.S. Pat. No. 5,763,588; Froehler et al., U.S. Pat. No. 5,830,653; Cook et al., U.S. Pat. No. 5,808,027; Cook et al., 6,166,199; and Matteucci et al., U.S. Pat. No. 6,005,096.

[0103] 3. Certain Modified Internucleoside Linkages

[0104] In certain embodiments, nucleosides of modified oligonucleotides may be linked together using any internucleoside linkage. The two main classes of internucleoside linking groups are defined by the presence or absence of a phosphorus atom. Representative phosphorus-containing internucleoside linkages include but are not limited to phosphodiesters, which contain a phosphodiester bond, P(O₂)═O, (also referred to as unmodified or naturally occurring linkages); phosphotriesters; methylphosphonates; methoxypropylphosphonates (“MOP”); phosphoramidates; mesyl phosphoramidates; phosphorothioates (P(O₂)═S); and phosphorodithioates (HS—P═S). Representative non-phosphorus containing internucleoside linking groups include but are not limited to methylenemethylimino (—CH₂—N(CH₃)—O—CH₂—); thiodiester, thionocarbamate (—O—C(═O)(NH)—S—); siloxane (—O—SiH₂—O—); and N,N′-dimethylhydrazine (—CH₂—N(CH₃)—N(CH₃)—). Modified internucleoside linkages, compared to naturally occurring phosphate linkages, can be used to alter, typically increase, nuclease resistance of the oligonucleotide. In certain embodiments, internucleoside linkages having a chiral atom can be prepared as a racemic mixture, or as separate enantiomers. Methods of preparation of phosphorous-containing and non-phosphorous-containing internucleoside linkages are well known to those skilled in the art.

[0105] Representative internucleoside linkages having a chiral center include but are not limited to alkylphosphonates and phosphorothioates. Modified oligonucleotides comprising internucleoside linkages having a chiral center can be prepared as populations of modified oligonucleotides comprising stereorandom internucleoside linkages, or as populations of modified oligonucleotides comprising phosphorothioate internucleoside linkages in particular stereochemical configurations. In certain embodiments, populations of modified oligonucleotides comprise phosphorothioate internucleoside linkages wherein all of the phosphorothioate internucleoside linkages are stereorandom. Such modified oligonucleotides can be generated using synthetic methods that result in random selection of the stereochemical configuration of each phosphorothioate internucleoside linkage. Nonetheless, as is well understood by those of skill in the art, each individual phosphorothioate of each individual oligonucleotide molecule has a defined stereoconfiguration. In certain embodiments, populations of modified oligonucleotides are enriched for modified oligonucleotides comprising one or more particular phosphorothioate internucleoside linkages in a particular, independently selected stereochemical configuration. In certain embodiments, the particular configuration of the particular phosphorothioate internucleoside linkage is present in at least 65% of the molecules in the population. In certain embodiments, the particular configuration of the particular phosphorothioate internucleoside linkage is present in at least 70% of the molecules in the population. In certain embodiments, the particular configuration of the particular phosphorothioate internucleoside linkage is present in at least 80% of the molecules in the population. In certain embodiments, the particular configuration of the particular phosphorothioate internucleoside linkage is present in at least 90% of the molecules in the population. In certain embodiments, the particular configuration of the particular phosphorothioate internucleoside linkage is present in at least 99% of the molecules in the population. Such chirally enriched populations of modified oligonucleotides can be generated using synthetic methods known in the art, e.g., methods described in Oka et al., JACS, 2003, 125, 8307, Wan et al. Nuc. Acid. Res., 2014, 42, 13456, and WO 2017/015555. In certain embodiments, a population of modified oligonucleotides is enriched for modified oligonucleotides having at least one indicated phosphorothioate in the (Sp) configuration. In certain embodiments, a population of modified oligonucleotides is enriched for modified oligonucleotides having at least one phosphorothioate in the (Rp) configuration. In certain embodiments, modified oligonucleotides comprising (Rp) and/or (Sp) phosphorothioates comprise one or more of the following formulas, respectively, wherein “B” indicates a nucleobase:

[chemical structure]

Unless otherwise indicated, chiral internucleoside linkages of modified oligonucleotides described herein can be stereorandom or in a particular stereochemical configuration.

[0106] In certain embodiments, modified oligonucleotides comprise an internucleoside motif of (5′ to 3′) sooosssssssssssssss. In certain embodiments, the particular stereochemical configuration of the modified oligonucleotides is (5′ to 3′) Sp-o-o-o-Sp-Sp-Sp-Rp-Sp-Sp-Rp-Sp-Sp-Sp-Sp-Sp-Sp-Sp-Sp or Sp-o-o-o-Sp-Sp-Sp-Rp-Sp-Sp-Sp-Sp-Sp-Sp-Sp-Sp-Sp-Sp-Sp; wherein each ‘Sp’ represents a phosphorothioate internucleoside linkage in the S configuration; Rp represents a phosphorothioate internucleoside linkage in the R configuration; and ‘o’ represents a phosphodiester internucleoside linkage.

[0107] Neutral internucleoside linkages include, without limitation, phosphotriesters, methylphosphonates, MMI (3′-CH₂—N(CH₃)—O-5′), amide-3 (3′-CH₂—C(═O)—N(H)-5′), amide-4 (3′-CH₂—N(H)—C(═O)-5′), formacetal (3′-O—CH₂—O-5′), methoxypropyl, and thioformacetal (3′-S—CH₂—O-5′). Further neutral internucleoside linkages include nonionic linkages comprising siloxane (dialkylsiloxane), carboxylate ester, carboxamide, sulfide, sulfonate ester and amides (see e.g., Carbohydrate Modifications in Antisense Research; Y. S. Sanghvi and P. D. Cook, Eds., ACS Symposium Series 580; Chapters 3 and 4, 40-65). Further neutral internucleoside linkages include nonionic linkages comprising mixed N, O, S and CH₂ component parts.

[0108] In certain embodiments, a modified internucleoside linkage is any of those described in WO 2021/030778, incorporated by reference herein.

[0109] B. Certain Motifs

[0110] In certain embodiments, modified oligonucleotides comprise one or more modified nucleosides comprising a modified sugar moiety. In certain embodiments, modified oligonucleotides comprise one or more modified nucleosides comprising a modified nucleobase. In certain embodiments, modified oligonucleotides comprise one or more modified internucleoside linkages. In such embodiments, the modified, unmodified, and differently modified sugar moieties, nucleobases, and/or internucleoside linkages of a modified oligonucleotide define a pattern or motif. In certain embodiments, the patterns of sugar moieties, nucleobases, and internucleoside linkages are each independent of one another. Thus, a modified oligonucleotide may be described by its sugar motif, nucleobase motif and/or internucleoside linkage motif (as used herein, nucleobase motif describes the modifications to the nucleobases independent of the sequence of nucleobases).

[0111] 1. Certain Sugar Motifs

[0112] In certain embodiments, oligonucleotides comprise one or more type of modified sugar and/or unmodified sugar moiety arranged along the oligonucleotide, or portion thereof, in a defined pattern or sugar motif. In certain instances, such sugar motifs include but are not limited to any of the sugar modifications discussed herein.

[0113] Certain modified oligonucleotides have a gapmer motif, which is defined by two external regions or “wings” and a central or internal region or “gap.” The three regions of a gapmer motif (the 5′-wing, the gap, and the 3′-wing) form a contiguous sequence of nucleosides wherein at least some of the sugar moieties of the nucleosides of each of the wings differ from at least some of the sugar moieties of the nucleosides of the gap. Specifically, at least the sugar moieties of the nucleosides of each wing that are closest to the gap (the 3′-most nucleoside of the 5′-wing and the 5′-most nucleoside of the 3′-wing) differ from the sugar moiety of the neighboring gap nucleosides, thus defining the boundary between the wings and the gap (i.e., the wing/gap junction). In certain embodiments, the sugar moieties within the gap are the same as one another. In certain embodiments, the gap includes one or more nucleoside having a sugar moiety that differs from the sugar moiety of one or more other nucleosides of the gap. In certain embodiments, the sugar motifs of the two wings are the same as one another (symmetric gapmer). In certain embodiments, the sugar motif of the 5′-wing differs from the sugar motif of the 3′-wing (asymmetric gapmer). In certain embodiments, modified oligonucleotides of the present invention are not gapmers.

[0114] In certain embodiments, the wings of a gapmer comprise 1-6 nucleosides. In certain embodiments, each nucleoside of each wing of a gapmer comprises a modified sugar moiety. In certain embodiments, at least one, at least two, at least three, at least four, at least five, or at least six nucleosides of each wing of a gapmer comprises a modified sugar moiety.

[0115] In certain embodiments, the gap of a gapmer comprises 7-12 nucleosides. In certain embodiments, each nucleoside of the gap of a gapmer comprises a 2′-deoxyribosyl sugar moiety. In certain embodiments, at least one nucleoside of the gap of a gapmer comprises a modified sugar moiety and each remaining nucleoside comprises a 2′-deoxyribosyl sugar moiety.

[0116] Herein, the lengths (number of nucleosides) of the three regions of a gapmer may be provided using the notation [# of nucleosides in the 5′-wing]-[# of nucleosides in the gap]-[# of nucleosides in the 3′-wing]. Thus, a 5-10-5 gapmer consists of 5 linked nucleosides in each wing and 10 linked nucleosides in the gap. Where such nomenclature is followed by a specific modification, that modification is the modification in each sugar moiety of each wing and the gap nucleosides comprise a 2′-deoxyribosyl sugar moiety. Thus, a 5-10-5 MOE gapmer consists of 5 linked 2′-MOE nucleosides in the 5′-wing, 10 linked 2′-deoxyribonucleosides in the gap, and 5 linked 2′-MOE nucleosides in the 3′-wing.

[0117] In certain embodiments, each nucleoside of a modified oligonucleotide, or portion thereof, comprises a 2′-substituted sugar moiety, a bicyclic sugar moiety, a sugar surrogate, or a 2′-deoxyribosyl sugar moiety. In certain embodiments, the 2′-substituted sugar moiety is selected from a 2′-MOE sugar moiety, a 2′-NMA sugar moiety, a 2′-OMe sugar moiety, and a 2′-F sugar moiety. In certain embodiments, the bicyclic sugar moiety is selected from a cEt sugar moiety and an LNA sugar moiety. In certain embodiments, the sugar surrogate is selected from morpholino, modified morpholino, PNA, THP, and F-HNA.

[0118] In certain embodiments, modified oligonucleotides comprise at least 12, at least 13, at least 14, at least 15, at least 16, at least 17, at least 18, at least 19, or at least 20 nucleosides comprising a modified sugar moiety. In certain embodiments, the modified sugar moiety is selected independently from a 2′-substituted sugar moiety, a bicyclic sugar moiety, or a sugar surrogate. In certain embodiments, the 2′-substituted sugar moiety is selected from a 2′-MOE sugar moiety, a 2′-NMA sugar moiety, a 2′-OMe sugar moiety, and a 2′-F sugar moiety. In certain embodiments, the bicyclic sugar moiety is selected from a cEt sugar moiety and an LNA sugar moiety. In certain embodiments, the sugar surrogate is selected from morpholino, modified morpholino, THP, and F-HNA.

[0119] In certain embodiments, each nucleoside of a modified oligonucleotide comprises a modified sugar moiety (“fully modified oligonucleotide”). In certain embodiments, each nucleoside of a fully modified oligonucleotide comprises a 2′-substituted sugar moiety, a bicyclic sugar moiety, or a sugar surrogate. In certain embodiments, the 2′-substituted sugar moiety is selected from a 2′-MOE sugar moiety, a 2′-NMA sugar moiety, a 2′-OMe sugar moiety, and a 2′-F sugar moiety. In certain embodiments, the bicyclic sugar moiety is selected from a cEt sugar moiety and an LNA sugar moiety. In certain embodiments, the sugar surrogate is selected from morpholino, modified morpholino, THP, and F-HNA. In certain embodiments, each nucleoside of a fully modified oligonucleotide comprises the same modified sugar moiety (“uniformly modified sugar motif”). In certain embodiments, the uniformly modified sugar motif is 7 to 20 nucleosides in length. In certain embodiments, each nucleoside of the uniformly modified sugar motif comprises a 2′-substituted sugar moiety, a bicyclic sugar moiety, or a sugar surrogate. In certain embodiments, the 2′-substituted sugar moiety is selected from a 2′-MOE sugar moiety, a 2′-NMA sugar moiety, a 2′-OMe sugar moiety, and a 2′-F sugar moiety. In certain embodiments, the bicyclic sugar moiety is selected from a cEt sugar moiety and an LNA sugar moiety. In certain embodiments, the sugar surrogate is selected from morpholino, modified morpholino, THP, and F-HNA.

[0120] In certain embodiments, modified oligonucleotides have a sugar motif comprising at least 1, at least 2, at least 3, or at least 4 2′-deoxyribonucleosides, but are otherwise fully modified. In certain embodiments, modified oligonucleotides having at least one fully modified sugar motif may also comprise not more than 1, not more than 2, not more than 3, or not more than 4 2′-deoxyribonucleosides. In certain embodiments, modified oligonucleotides having at least one fully modified sugar motif may also comprise exactly 1, exactly 2, exactly 3, or exactly 4 2′-deoxyribonucleosides. In certain embodiments, modified oligonucleotides comprise more than 4 2′-deoxyribonucleosides, provided they do not include a region comprising 4 or more contiguous 2′-deoxyribonucleosides

[0121] 2. Certain Nucleobase Motifs

[0122] In certain embodiments, oligonucleotides comprise modified and/or unmodified nucleobases arranged along the oligonucleotide, or portion thereof, in a defined pattern or motif. In certain embodiments, each nucleobase is modified. In certain embodiments, none of the nucleobases are modified. In certain embodiments, each purine or each pyrimidine is modified. In certain embodiments, each adenine is modified. In certain embodiments, each guanine is modified. In certain embodiments, each thymine is modified. In certain embodiments, each uracil is modified. In certain embodiments, each cytosine is modified. In certain embodiments, some or all of the cytosine nucleobases in a modified oligonucleotide are 5-methyl cytosines. In certain embodiments, all of the cytosine nucleobases are 5-methyl cytosines and all of the other nucleobases of the modified oligonucleotide are unmodified nucleobases.

[0123] In certain embodiments, modified oligonucleotides comprise a block of modified nucleobases. In certain such embodiments, the block is at the 3′-end of the oligonucleotide. In certain embodiments the block is within 3 nucleosides of the 3′-end of the oligonucleotide. In certain embodiments, the block is at the 5′-end of the oligonucleotide. In certain embodiments the block is within 3 nucleosides of the 5′-end of the oligonucleotide.

[0124] In certain embodiments, oligonucleotides having a gapmer motif comprise a nucleoside comprising a modified nucleobase. In certain such embodiments, one nucleoside comprising a modified nucleobase is in the central gap of an oligonucleotide having a gapmer motif. In certain such embodiments, the sugar moiety of the nucleoside is a 2′-deoxyribosyl sugar moiety. In certain embodiments, the modified nucleobase is selected from: a 2-thiopyrimidine and a 5-propynepyrimidine.

[0125] 3. Certain Internucleoside Linkage Motifs

[0126] In certain embodiments, oligonucleotides comprise modified and/or unmodified internucleoside linkages arranged along the oligonucleotide, or portion thereof, in a defined pattern or motif. In certain embodiments, each internucleoside linking group is a phosphodiester internucleoside linkage. In certain embodiments, each internucleoside linking group of a modified oligonucleotide is a phosphorothioate internucleoside linkage. In certain embodiments, each internucleoside linkage of a modified oligonucleotide is independently selected from a phosphorothioate internucleoside linkage and phosphodiester internucleoside linkage. In certain embodiments, each phosphorothioate internucleoside linkage is independently selected from a stereorandom phosphorothioate, a (Sp) phosphorothioate, and a (Rp) phosphorothioate. In certain embodiments, the sugar motif of a modified oligonucleotide is a gapmer and the internucleoside linkages within the gap are all modified. In certain such embodiments, some or all of the internucleoside linkages in the wings are unmodified phosphodiester internucleoside linkages. In certain embodiments, the terminal internucleoside linkages are modified. In certain embodiments, the sugar motif of a modified oligonucleotide is a gapmer, and the internucleoside linkage motif comprises at least one phosphodiester internucleoside linkage in at least one wing, wherein the at least one phosphodiester internucleoside linkage is not a terminal internucleoside linkage, and the remaining internucleoside linkages are phosphorothioate internucleoside linkages. In certain such embodiments, all of the phosphorothioate internucleoside linkages are stereorandom. In certain embodiments, all of the phosphorothioate internucleoside linkages in the wings are (Sp) phosphorothioates, and the gap comprises at least one Sp, Sp, Rp motif. In certain embodiments, populations of modified oligonucleotides are enriched for modified oligonucleotides comprising such internucleoside linkage motifs.

[0127] In certain embodiments, modified oligonucleotides comprise at least 1, at least 2, at least 3, at least 4, at least 5, at least 6, at least 7, at least 8, at least 9, at least 10, at least 11, at least 12, at least 13, at least 14, at least 15, at least 16, at least 17, at least 18, or at least 19 phosphodiester internucleoside linkages. In certain embodiments, modified oligonucleotides comprise at least 1, at least 2, at least 3, at least 4, at least 5, at least 6, at least 7, at least 8, at least 9, at least 10, at least 11, at least 12, at least 13, at least 14, at least 15, at least 16, at least 17, at least 18, or at least 19 phosphorothioate internucleoside linkages. In certain embodiments, modified oligonucleotides comprise at least 1, at least 2, at least 3, at least 4, or at least 5 phosphodiester internucleoside linkages and the remainder of the internucleoside linkages are phosphorothioate internucleoside linkages.

[0128] In certain embodiments, modified oligonucleotides have an internucleoside linkage motif selected from soossssssssssssss, sososssssssssssss, sosssosssssssssss, sosssssosssssssss, sssoossssssssssss, sssssssoossssssss, sssssssssoossssss, sssssssssssoossss, sosssssssosssssss, sosssssssssosssss, sossssssssssssoss, ssosssssssssssoss, ssssosssssssssoss, sssssoossssssssss, ssssssosssssssoss, ssssssssossssosss, ssssssssosssssoss, ssssssssssosssoss, sssssssssssososss, ssssssssssssososs, and sssssssssssssooss; wherein, ‘s’ represents a phosphorothioate internucleoside linkage and ‘o’ represents a phosphodiester internucleoside linkage.

[0129] In certain embodiments, modified oligonucleotides have an internucleoside linkage motif selected from sososssssssssssss, soossssssssssssss, sosssosssssssssss, sosssssosssssssss, sosssssssosssssss, sssoossssssssssss, sssssssoossssssss, sssssssssoossssss, and sssssssssssoossss; wherein, ‘s’ represents a phosphorothioate internucleoside linkage and ‘o’ represents a phosphodiester internucleoside linkage.

[0130] In certain embodiments, modified oligonucleotides have an internucleoside linkage motif selected from ossssssssssssssssso, ssssssssssssssssso, and osssssssssssssssss; wherein, ‘s’ represents a phosphorothioate internucleoside linkage and ‘o’ represents a phosphodiester internucleoside linkage.

[0131] C. Certain Lengths

[0132] It is possible to increase or decrease the length of an oligonucleotide without eliminating activity. For example, in Woolf et al., Proc. Natl. Acad. Sci. USA, 1992, 89, 7305-7309, 1992), a series of oligonucleotides 13-25 nucleobases in length were tested for their ability to induce cleavage of a target nucleic acid in an oocyte injection model. Oligonucleotides 25 nucleobases in length with 8 or 11 mismatch bases near the ends of the oligonucleotides were able to direct specific cleavage of the target nucleic acid, albeit to a lesser extent than the oligonucleotides that contained no mismatches. Similarly, target specific cleavage was achieved using 13 nucleobase oligonucleotides, including those with 1 or 3 mismatches.

[0133] In certain embodiments, oligonucleotides (including modified oligonucleotides) can have any of a variety of ranges of lengths. In certain embodiments, oligonucleotides consist of X to Y linked nucleosides, where X represents the fewest number of nucleosides in the range and Y represents the largest number nucleosides in the range. In certain such embodiments, X and Y are each independently selected from 8, 9, 10, 11, 12, 13, 14, 15, 16, 17, 18, 19, 20, 21, 22, 23, 24, 25, 26, 27, 28, 29, 30, 31, 32, 33, 34, 35, 36, 37, 38, 39, 40, 41, 42, 43, 44, 45, 46, 47, 48, 49, and 50; provided that X≤Y. For example, in certain embodiments, oligonucleotides consist of 12 to 13, 12 to 14, 12 to 15, 12 to 16, 12 to 17, 12 to 18, 12 to 19, 12 to 20, 12 to 21, 12 to 22, 12 to 23, 12 to 24, 12 to 25, 12 to 26, 12 to 27, 12 to 28, 12 to 29, 12 to 30, 13 to 14, 13 to 15, 13 to 16, 13 to 17, 13 to 18, 13 to 19, 13 to 20, 13 to 21, 13 to 22, 13 to 23, 13 to 24, 13 to 25, 13 to 26, 13 to 27, 13 to 28, 13 to 29, 13 to 30, 14 to 15, 14 to 16, 14 to 17, 14 to 18, 14 to 19, 14 to 20, 14 to 21, 14 to 22, 14 to 23, 14 to 24, 14 to 25, 14 to 26, 14 to 27, 14 to 28, 14 to 29, 14 to 30, 15 to 16, 15 to 17, 15 to 18, 15 to 19, 15 to 20, 15 to 21, 15 to 22, 15 to 23, 15 to 24, 15 to 25, 15 to 26, 15 to 27, 15 to 28, 15 to 29, 15 to 30, 16 to 17, 16 to 18, 16 to 19, 16 to 20, 16 to 21, 16 to 22, 16 to 23, 16 to 24, 16 to 25, 16 to 26, 16 to 27, 16 to 28, 16 to 29, 16 to 30, 17 to 18, 17 to 19, 17 to 20, 17 to 21, 17 to 22, 17 to 23, 17 to 24, 17 to 25, 17 to 26, 17 to 27, 17 to 28, 17 to 29, 17 to 30, 18 to 19, 18 to 20, 18 to 21, 18 to 22, 18 to 23, 18 to 24, 18 to 25, 18 to 26, 18 to 27, 18 to 28, 18 to 29, 18 to 30, 19 to 20, 19 to 21, 19 to 22, 19 to 23, 19 to 24, 19 to 25, 19 to 26, 19 to 29, 19 to 28, 19 to 29, 19 to 30, 20 to 21, 20 to 22, 20 to 23, 20 to 24, 20 to 25, 20 to 26, 20 to 27, 20 to 28, 20 to 29, 20 to 30, 21 to 22, 21 to 23, 21 to 24, 21 to 25, 21 to 26, 21 to 27, 21 to 28, 21 to 29, 21 to 30, 22 to 23, 22 to 24, 22 to 25, 22 to 26, 22 to 27, 22 to 28, 22 to 29, 22 to 30, 23 to 24, 23 to 25, 23 to 26, 23 to 27, 23 to 28, 23 to 29, 23 to 30, 24 to 25, 24 to 26, 24 to 27, 24 to 28, 24 to 29, 24 to 30, 25 to 26, 25 to 27, 25 to 28, 25 to 29, 25 to 30, 26 to 27, 26 to 28, 26 to 29, 26 to 30, 27 to 28, 27 to 29, 27 to 30, 28 to 29, 28 to 30, or 29 to 30 linked nucleosides.

[0134] In certain embodiments, oligonucleotides consist of 16 linked nucleosides. In certain embodiments, oligonucleotides consist of 17 linked nucleosides. In certain embodiments, oligonucleotides consist of 18 linked nucleosides. In certain embodiments, oligonucleotides consist of 19 linked nucleosides. In certain embodiments, oligonucleotides consist of 20 linked nucleosides.

[0135] D. Certain Modified Oligonucleotides

[0136] In certain embodiments, the above modifications (sugar, nucleobase, internucleoside linkage) are incorporated into a modified oligonucleotide. In certain embodiments, modified oligonucleotides are characterized by their modification motifs and overall lengths. In certain embodiments, such parameters are each independent of one another. Thus, unless otherwise indicated, each internucleoside linkage of an oligonucleotide having a gapmer sugar motif may be modified or unmodified and may or may not follow the gapmer modification pattern of the sugar modifications. For example, the internucleoside linkages within the wing regions of a sugar gapmer may be the same or different from one another and may be the same or different from the internucleoside linkages of the gap region of the sugar motif. Likewise, such sugar gapmer oligonucleotides may comprise one or more modified nucleobase independent of the gapmer pattern of the sugar modifications. Unless otherwise indicated, all modifications are independent of nucleobase sequence.

[0137] E. Certain Populations of Modified Oligonucleotides

[0138] Populations of modified oligonucleotides in which all of the modified oligonucleotides of the population have the same molecular formula can be stereorandom populations or chirally enriched populations. All of the chiral centers of all of the modified oligonucleotides are stereorandom in a stereorandom population. In a chirally enriched population, at least one particular chiral center is not stereorandom in the modified oligonucleotides of the population. In certain embodiments, the modified oligonucleotides of a chirally enriched population are enriched for β-D ribosyl sugar moieties, and all of the phosphorothioate internucleoside linkages are stereorandom. In certain embodiments, the modified oligonucleotides of a chirally enriched population are enriched for both β-D ribosyl sugar moieties and at least one, particular phosphorothioate internucleoside linkage in a particular stereochemical configuration.

[0139] F. Nucleobase Sequence

[0140] In certain embodiments, oligonucleotides (unmodified or modified oligonucleotides) are further described by their nucleobase sequence. In certain embodiments oligonucleotides have a nucleobase sequence that is complementary to a second oligonucleotide or an identified reference nucleic acid, such as a target nucleic acid. In certain such embodiments, a portion of an oligonucleotide has a nucleobase sequence that is complementary to a second oligonucleotide or an identified reference nucleic acid, such as a target nucleic acid. In certain embodiments, the nucleobase sequence of a portion or entire length of an oligonucleotide is at least 50%, at least 60%, at least 70%, at least 80%, at least 85%, at least 90%, at least 95%, or 100% complementary to the second oligonucleotide or nucleic acid, such as a target nucleic acid.

[0141] I. Certain Oligomeric Compounds

[0142] In certain embodiments, provided herein are oligomeric compounds, which consist of an oligonucleotide (modified or unmodified) and optionally one or more conjugate groups and/or terminal groups. Conjugate groups consist of one or more conjugate moiety and a conjugate linker which links the conjugate moiety to the oligonucleotide. Conjugate groups may be attached to either or both ends of an oligonucleotide and/or at any internal position. In certain embodiments, conjugate groups are attached to the 2′-position of a nucleoside of a modified oligonucleotide. In certain embodiments, conjugate groups that are attached to either or both ends of an oligonucleotide are terminal groups. In certain such embodiments, conjugate groups or terminal groups are attached at the 3′ and/or 5′-end of oligonucleotides. In certain such embodiments, conjugate groups (or terminal groups) are attached at the 3′-end of oligonucleotides. In certain embodiments, conjugate groups are attached near the 3′-end of oligonucleotides. In certain embodiments, conjugate groups (or terminal groups) are attached at the 5′-end of oligonucleotides. In certain embodiments, conjugate groups are attached near the 5′-end of oligonucleotides.

[0143] Examples of terminal groups include but are not limited to conjugate groups, capping groups, phosphate moieties, protecting groups, abasic nucleosides, modified or unmodified nucleosides, and two or more nucleosides that are independently modified or unmodified.

[0144] A. Certain Conjugate Groups

[0145] In certain embodiments, oligonucleotides are covalently attached to one or more conjugate groups. In certain embodiments, conjugate groups modify one or more properties of the attached oligonucleotide, including but not limited to pharmacodynamics, pharmacokinetics, stability, binding, absorption, tissue distribution, cellular distribution, cellular uptake, charge, and clearance. In certain embodiments, conjugate groups impart a new property on the attached oligonucleotide, e.g., fluorophores or reporter groups that enable detection of the oligonucleotide. Certain conjugate groups and conjugate moieties have been described previously, for example: cholesterol moiety (Letsinger et al., Proc. Natl. Acad. Sci. USA, 1989, 86, 6553-6556), cholic acid (Manoharan et al., Bioorg. Med. Chem. Lett., 1994, 4, 1053-1060), a thioether, e.g., hexyl-S-tritylthiol (Manoharan et al., Ann. N. Y. Acad. Sci., 1992, 660, 306-309; Manoharan et al., Bioorg. Med. Chem. Lett., 1993, 3, 2765-2770), a thiocholesterol (Oberhauser et al., Nucl. Acids Res., 1992, 20, 533-538), an aliphatic chain, e.g., do-decan-diol or undecyl residues (Saison-Behmoaras et al., EMBO J., 1991, 10, 1111-1118; Kabanov et al., FEBS Lett., 1990, 259, 327-330; Svinarchuk et al., Biochimie, 1993, 75, 49-54), a phospholipid, e.g., di-hexadecyl-rac-glycerol or triethyl-ammonium 1,2-di-O-hexadecyl-rac-glycero-3-H-phosphonate (Manoharan et al., Tetrahedron Lett., 1995, 36, 3651-3654; Shea et al., Nucl. Acids Res., 1990, 18, 3777-3783), a polyamine or a polyethylene glycol chain (Manoharan et al., Nucleosides & Nucleotides, 1995, 14, 969-973), or adamantane acetic acid a palmityl moiety (Mishra et al., Biochim. Biophys. Acta, 1995, 1264, 229-237), an octadecylamine or hexylamino-carbonyl-oxycholesterol moiety (Crooke et al., J. Pharmacol. Exp. Ther., 1996, 277, 923-937), a tocopherol group (Nishina et al., Molecular Therapy Nucleic Acids, 2015, 4, e220; and Nishina et al., Molecular Therapy, 2008, 16, 734-740), or a GalNAc cluster (e.g., WO2014/179620).

[0146] 1. Conjugate Moieties

[0147] Conjugate moieties include, without limitation, intercalators, reporter molecules, polyamines, polyamides, peptides, carbohydrates, vitamin moieties, polyethylene glycols, thioethers, polyethers, cholesterols, thiocholesterols, cholic acid moieties, folate, lipids, lipophilic groups, phospholipids, biotin, phenazine, phenanthridine, anthraquinone, adamantane, acridine, fluoresceins, rhodamines, coumarins, fluorophores, and dyes.

[0148] In certain embodiments, a conjugate moiety comprises an active drug substance, for example, aspirin, warfarin, phenylbutazone, ibuprofen, suprofen, fen-bufen, ketoprofen, (S)-(+)-pranoprofen, carprofen, dansylsarcosine, 2,3,5-triiodobenzoic acid, fingolimod, flufenamic acid, folinic acid, a benzothiadiazide, chlorothiazide, a diazepine, indo-methicin, a barbiturate, a cephalosporin, a sulfa drug, an antidiabetic, an antibacterial, or an antibiotic.

[0149] 2. Conjugate Linkers

[0150] Conjugate moieties are attached to oligonucleotides through conjugate linkers. In certain oligomeric compounds, the conjugate linker is a single chemical bond (i.e., the conjugate moiety is attached directly to an oligonucleotide through a single bond). In certain oligomeric compounds, a conjugate moiety is attached to an oligonucleotide via a more complex conjugate linker comprising one or more conjugate linker moieties, which are sub-units making up a conjugate linker. In certain embodiments, the conjugate linker comprises a chain structure, such as a hydrocarbyl chain, or an oligomer of repeating units such as ethylene glycol, nucleosides, or amino acid units.

[0151] In certain embodiments, a conjugate linker comprises one or more groups selected from alkyl, amino, oxo, amide, disulfide, polyethylene glycol, ether, thioether, and hydroxylamino. In certain such embodiments, the conjugate linker comprises groups selected from alkyl, amino, oxo, amide and ether groups. In certain embodiments, the conjugate linker comprises groups selected from alkyl and amide groups. In certain embodiments, the conjugate linker comprises groups selected from alkyl and ether groups. In certain embodiments, the conjugate linker comprises at least one phosphorus moiety. In certain embodiments, the conjugate linker comprises at least one phosphate group. In certain embodiments, the conjugate linker includes at least one neutral linking group.

[0152] In certain embodiments, conjugate linkers, including the conjugate linkers described above, are bifunctional linking moieties, e.g., those known in the art to be useful for attaching conjugate groups to parent compounds, such as the oligonucleotides provided herein. In general, a bifunctional linking moiety comprises at least two functional groups. One of the functional groups is selected to bind to a particular site on a parent compound and the other is selected to bind to a conjugate group. Examples of functional groups used in a bifunctional linking moiety include but are not limited to electrophiles for reacting with nucleophilic groups and nucleophiles for reacting with electrophilic groups. In certain embodiments, bifunctional linking moieties comprise one or more groups selected from amino, hydroxyl, carboxylic acid, thiol, alkyl, alkenyl, and alkynyl.

[0153] Examples of conjugate linkers include but are not limited to pyrrolidine, 8-amino-3,6-dioxaoctanoic acid (ADO), succinimidyl 4-(N-maleimidomethyl) cyclohexane-1-carboxylate (SMCC) and 6-aminohexanoic acid (AHEX or AHA). Other conjugate linkers include but are not limited to substituted or unsubstituted C₁-C₁₀ alkyl, substituted or unsubstituted C₂-C₁₀ alkenyl or substituted or unsubstituted C₂-C₁₀ alkynyl, wherein a nonlimiting list of preferred substituent groups includes hydroxyl, amino, alkoxy, carboxy, benzyl, phenyl, nitro, thiol, thioalkoxy, halogen, alkyl, aryl, alkenyl and alkynyl.

[0154] In certain embodiments, conjugate linkers comprise 1-10 linker-nucleosides. In certain embodiments, conjugate linkers comprise 2-5 linker-nucleosides. In certain embodiments, conjugate linkers comprise exactly 3 linker-nucleosides. In certain embodiments, conjugate linkers comprise the TCA motif. In certain embodiments, such linker-nucleosides are modified nucleosides. In certain embodiments such linker-nucleosides comprise a modified sugar moiety. In certain embodiments, linker-nucleosides are unmodified. In certain embodiments, linker-nucleosides comprise an optionally protected heterocyclic base selected from a purine, substituted purine, pyrimidine or substituted pyrimidine. In certain embodiments, a cleavable moiety is a nucleoside selected from uracil, thymine, cytosine, 4-N-benzoylcytosine, 5-methyl cytosine, 4-N-benzoyl-5-methyl cytosine, adenine, 6-N-benzoyladenine, guanine and 2-N-isobutyrylguanine. It is typically desirable for linker-nucleosides to be cleaved from the oligomeric compound after it reaches a target tissue. Accordingly, linker-nucleosides are typically linked to one another and to the remainder of the oligomeric compound through cleavable bonds. In certain embodiments, such cleavable bonds are phosphodiester bonds.

[0155] Herein, linker-nucleosides are not considered to be part of the oligonucleotide. Accordingly, in embodiments in which an oligomeric compound comprises an oligonucleotide consisting of a specified number or range of linked nucleosides and/or a specified percent complementarity to a reference nucleic acid and the oligomeric compound also comprises a conjugate group comprising a conjugate linker comprising linker-nucleosides, those linker-nucleosides are not counted toward the length of the oligonucleotide and are not used in determining the percent complementarity of the oligonucleotide for the reference nucleic acid. For example, an oligomeric compound may comprise (1) a modified oligonucleotide consisting of 8-30 nucleosides and (2) a conjugate group comprising 1-10 linker-nucleosides that are contiguous with the nucleosides of the modified oligonucleotide. The total number of contiguous linked nucleosides in such an oligomeric compound is more than 30. Alternatively, an oligomeric compound may comprise a modified oligonucleotide consisting of 8-30 nucleosides and no conjugate group. The total number of contiguous linked nucleosides in such an oligomeric compound is no more than 30. Unless otherwise indicated conjugate linkers comprise no more than 10 linker-nucleosides. In certain embodiments, conjugate linkers comprise no more than 5 linker-nucleosides. In certain embodiments, conjugate linkers comprise no more than 3 linker-nucleosides. In certain embodiments, conjugate linkers comprise no more than 2 linker-nucleosides. In certain embodiments, conjugate linkers comprise no more than 1 linker-nucleoside.

[0156] In certain embodiments, it is desirable for a conjugate group to be cleaved from the oligonucleotide. For example, in certain circumstances oligomeric compounds comprising a particular conjugate moiety are better taken up by a particular cell type, but once the oligomeric compound has been taken up, it is desirable that the conjugate group be cleaved to release the unconjugated or parent oligonucleotide. Thus, certain conjugate linkers may comprise one or more cleavable moieties. In certain embodiments, a cleavable moiety is a cleavable bond. In certain embodiments, a cleavable moiety is a group of atoms comprising at least one cleavable bond. In certain embodiments, a cleavable moiety comprises a group of atoms having one, two, three, four, or more than four cleavable bonds. In certain embodiments, a cleavable moiety is selectively cleaved inside a cell or subcellular compartment, such as a lysosome. In certain embodiments, a cleavable moiety is selectively cleaved by endogenous enzymes, such as nucleases.

[0157] In certain embodiments, a cleavable bond is selected from among: an amide, an ester, an ether, one or both esters of a phosphodiester, a phosphate ester, a carbamate, or a disulfide. In certain embodiments, a cleavable bond is one or both of the esters of a phosphodiester. In certain embodiments, a cleavable moiety comprises a phosphate or phosphodiester. In certain embodiments, the cleavable moiety is a phosphate linkage between an oligonucleotide and a conjugate moiety or conjugate group.

[0158] In certain embodiments, a cleavable moiety comprises or consists of one or more linker-nucleosides. In certain such embodiments, the one or more linker-nucleosides are linked to one another and/or to the remainder of the oligomeric compound through cleavable bonds. In certain embodiments, such cleavable bonds are unmodified phosphodiester bonds. In certain embodiments, a cleavable moiety is 2′-deoxyribonucleoside that is attached to either the 3′ or 5′-terminal nucleoside of an oligonucleotide by a phosphate internucleoside linkage and covalently attached to the remainder of the conjugate linker or conjugate moiety by a phosphate or phosphorothioate internucleoside linkage. In certain such embodiments, the cleavable moiety is 2′-deoxyadenosine.

[0159] B. Certain Terminal Groups

[0160] In certain embodiments, oligomeric compounds comprise one or more terminal groups. In certain such embodiments, oligomeric compounds comprise a stabilized 5′-phosphate. Stabilized 5′-phosphates include, but are not limited to 5′-phosphanates, including, but not limited to 5′-vinylphosphonates. In certain embodiments, terminal groups comprise one or more abasic nucleosides and/or inverted nucleosides. In certain embodiments, terminal groups comprise one or more 2′-linked nucleosides. In certain such embodiments, the 2′-linked nucleoside is an abasic nucleoside.

[0161] III. Oligomeric Duplexes

[0162] In certain embodiments, oligomeric compounds described herein comprise an oligonucleotide, having a nucleobase sequence complementary to that of a target nucleic acid. In certain embodiments, an oligomeric compound is paired with a second oligomeric compound to form an oligomeric duplex. Such oligomeric duplexes comprise a first oligomeric compound having a portion complementary to a target nucleic acid and a second oligomeric compound having a portion complementary to the first oligomeric compound. In certain embodiments, the first oligomeric compound of an oligomeric duplex comprises or consists of (1) a modified or unmodified oligonucleotide and optionally a conjugate group and (2) a second modified or unmodified oligonucleotide and optionally a conjugate group. Either or both oligomeric compounds of an oligomeric duplex may comprise a conjugate group. The oligonucleotides of each oligomeric compound of an oligomeric duplex may include non-complementary overhanging nucleosides.

[0163] IV. Antisense Activity

[0164] In certain embodiments, oligomeric compounds and oligomeric duplexes are capable of hybridizing to a target nucleic acid, resulting in at least one antisense activity; such oligomeric compounds and oligomeric duplexes are antisense compounds. In certain embodiments, antisense compounds have antisense activity when they reduce, modulate, or increase the amount or activity of a target nucleic acid by 25% or more in the standard cell assay. In certain embodiments, antisense compounds selectively affect one or more target nucleic acid. Such antisense compounds comprise a nucleobase sequence that hybridizes to one or more target nucleic acid, resulting in one or more desired antisense activity and does not hybridize to one or more non-target nucleic acid or does not hybridize to one or more non-target nucleic acid in such a way that results in significant undesired antisense activity.

[0165] In certain antisense activities, hybridization of an antisense compound to a target nucleic acid results in recruitment of a protein that cleaves the target nucleic acid. For example, certain antisense compounds result in RNase H mediated cleavage of the target nucleic acid. RNase H is a cellular endonuclease that cleaves the RNA strand of an RNA:DNA duplex. The DNA in such an RNA:DNA duplex need not be unmodified DNA. In certain embodiments, provided herein are antisense compounds that are sufficiently “DNA-like” to elicit RNase H activity. In certain embodiments, one or more non-DNA-like nucleoside in the gap of a gapmer is tolerated. In certain embodiments, antisense compound of the present invention do not result in cleavage of a target nucleic acid through RNase H activity.

[0166] In certain antisense activities, an antisense compound or a portion of an antisense compound is loaded into an RNA-induced silencing complex (RISC), ultimately resulting in cleavage of the target nucleic acid. For example, certain antisense compounds result in cleavage of the target nucleic acid by Argonaute. Antisense compounds that are loaded into RISC are RNAi compounds. RNAi compounds may be double-stranded (siRNA) or single-stranded (ssRNA). In certain embodiments, antisense compound of the present invention do not result in cleavage of a target nucleic acid through RISC activity.

[0167] In certain embodiments, hybridization of an antisense compound to a target nucleic acid does not result in recruitment of a protein that cleaves that target nucleic acid. In certain embodiments, hybridization of the antisense compound to the target nucleic acid results in alteration of splicing of the target nucleic acid. In certain embodiments, hybridization of an antisense compound to a target nucleic acid results in inhibition of a binding interaction between the target nucleic acid and a protein or other nucleic acid. In certain embodiments, hybridization of an antisense compound to a target nucleic acid results in alteration of translation of the target nucleic acid. In certain embodiments, hybridization of an antisense compound to a target nucleic acid results in exon inclusion. In certain embodiments, hybridization of an antisense compound to a target nucleic acid results in an increase in the amount or activity of a target nucleic acid. In certain embodiments, hybridization of an antisense compound complementary to a target nucleic acid results in alteration of splicing, leading to the inclusion of an exon in the mRNA.

[0168] Antisense activities may be observed directly or indirectly. In certain embodiments, observation or detection of an antisense activity involves observation or detection of a change in an amount of a target nucleic acid or protein encoded by such target nucleic acid, a change in the ratio of splice variants of a nucleic acid or protein and/or a phenotypic change in a cell or subject.

[0169] V. Certain Target Nucleic Acids

[0170] In certain embodiments, oligomeric compounds comprise or consist of an oligonucleotide comprising a portion that is complementary to a target nucleic acid. In certain embodiments, the target nucleic acid is an endogenous RNA molecule. In certain embodiments, the target nucleic acid encodes a protein. In certain such embodiments, the target nucleic acid is selected from: a mature mRNA and a pre-mRNA, including intronic, exonic and untranslated regions. In certain embodiments, the target nucleic acid is a mature mRNA. In certain embodiments, the target nucleic acid is a pre-mRNA. In certain embodiments, the target region is entirely within an intron. In certain embodiments, the target region spans an intron/exon junction. In certain embodiments, the target region is at least 50% within an intron.

[0171] A. Complementarity/Mismatches to the Target Nucleic Acid

[0172] It is possible to introduce mismatch bases without eliminating activity. For example, Gautschi et al (J. Natl. Cancer Inst. 93:463-471, March 2001) demonstrated the ability of an oligonucleotide having 100% complementarity to the bcl-2 mRNA and having 3 mismatches to the bcl-xL mRNA to reduce the expression of both bcl-2 and bcl-xL in vitro and in vivo. Furthermore, this oligonucleotide demonstrated potent anti-tumor activity in vivo. Maher and Dolnick (Nuc. Acid. Res. 16:3341-3358, 1988) tested a series of tandem 14 nucleobase oligonucleotides, and a 28 and 42 nucleobase oligonucleotides comprised of the sequence of two or three of the tandem oligonucleotides, respectively, for their ability to arrest translation of human DHFR in a rabbit reticulocyte assay. Each of the three 14 nucleobase oligonucleotides alone was able to inhibit translation, albeit at a more modest level than the 28 or 42 nucleobase oligonucleotides.

[0173] In certain embodiments, oligonucleotides are complementary to the target nucleic acid over the entire length of the oligonucleotide. In certain embodiments, oligonucleotides are 99%, 95%, 90%, 85%, or 80% complementary to the target nucleic acid. In certain embodiments, oligonucleotides are at least 80% complementary to the target nucleic acid over the entire length of the oligonucleotide and comprise a portion that is 100% or fully complementary to a target nucleic acid. In certain embodiments, the portion of full complementarity is 6 7, 8, 9, 10, 11, 12, 13, 14, 15, 16, 17, 18, 19, or 20 nucleobases in length.

[0174] In certain embodiments, oligonucleotides comprise one or more mismatched nucleobases relative to the target nucleic acid. In certain embodiments, the mismatch is at position 1, 2, 3, 4, 5, 6, 7, 8, 9, 10, 11, 12, 13, 14, 15, 16, 17, 18, 19, or 20 from the 5′-end of the oligonucleotide.

[0175] A. Certain Pre-mRNA Targets

[0176] a. SMN2

[0177] In certain embodiments, oligomeric compounds comprise or consist of a modified oligonucleotide that is complementary to a target nucleic acid encoding SMN2, or a portion thereof. In certain embodiments, the SMN2 target nucleic acid has the sequence set forth in SEQ ID NO: 1 (GENBANK Accession No. NT_006713.14 truncated from nucleotides 19939708 to 19967777).

[0178] b. SCN1A

[0179] In certain embodiments, oligomeric compounds comprise or consist of a modified oligonucleotide that is complementary to a target nucleic acid encoding SCN1A, or a portion thereof. In certain embodiments, the SCN1A target nucleic acid has the nucleobase sequence set forth in SEQ ID NO: 2 (the complement of GENBANK Accession No. NC_000002.12 truncated from nucleotides 165982001 to 166152000). In certain embodiments, the SCN1A target nucleic acid has the nucleobase sequence set forth in SEQ ID NO: 3 (GENBANK Accession No. NM_001165963.2).

[0180] c. DMD

[0181] In certain embodiments, oligomeric compounds comprise or consist of a modified oligonucleotide that is complementary to a target nucleic acid encoding DMD, or a portion thereof. In certain embodiments, the DMD target nucleic acid has the nucleobase sequence set forth in SEQ ID NO: 75 (the complement of GENBANK Accession No. NC_000023.11 truncated from nucleotides 31116001 to 33343000). In certain embodiments, the DMD target nucleic acid has the nucleobase sequence set forth in SEQ ID NO: 76 (GENBANK Accession No. NM_004007.1).

[0182] d. APP

[0183] In certain embodiments, oligomeric compounds comprise or consist of a modified oligonucleotide that is complementary to a target nucleic acid encoding APP, or a portion thereof. In certain embodiments, the APP target nucleic acid has the sequence set forth in SEQ ID NO: 68 (the cDNA of Ensembl transcript ENST00000346798.7) or the complement of SEQ ID NO: 69 (GENBANK Accession No. NC_000021.9 truncated from nucleotides 25878001 to 26174000). In certain embodiments, the APP target nucleic acid has the sequence set forth in any of known splice variants of APP, including but not limited to SEQ ID NO: 70 (the cDNA of Ensembl transcript ENST00000357903.7), SEQ ID NO: 71 (the cDNA of Ensembl transcript ENST00000348990.9), SEQ ID NO: 72 (the cDNA of Ensembl transcript ENST00000440126.7), SEQ ID NO: 73 (the cDNA of Ensembl transcript ENST00000354192.7), and/or SEQ ID NO: 74 (the cDNA of Ensembl transcript ENST00000358918.7).

[0184] e. ATXN3

[0185] In certain embodiments, oligomeric compounds comprise or consist of a modified oligonucleotide that is complementary to ATXN3, or a portion thereof. In certain embodiments, the ATXN3 target nucleic acid has the sequence set forth in SEQ ID NO: 77 (GENBANK Accession No: NM_004993.5), or SEQ ID NO: 78 (the complement of GENBANK Accession No NC_000014.9 truncated from nucleotides 92,056,001 to 92,110,000).

[0186] f. SmgGDS

[0187] In certain embodiments, oligomeric compounds comprise or consist of a modified oligonucleotide that is complementary to a target nucleic acid encoding SmgGDS, or a portion thereof. In certain embodiments, the SmgGDS target nucleic acid has the sequence set forth in SEQ ID NO: 79 (GENBANK Accession No. NT_016354.20 truncated from nucleotides 39338995 to 39523480. In certain embodiments, the SmgGDS target nucleic acid has the nucleobase sequence set forth in SEQ ID NO: 80 (GENBANK Accession No. NM_021159.4).

[0188] g. PK-M

[0189] In certain embodiments, oligomeric compounds comprise or consist of a modified oligonucleotide that is complementary to a target nucleic acid encoding PK-M, or a portion thereof. In certain embodiments, the PK-M target nucleic acid has the sequence set forth in SEQ ID NO: 81 (the complement of GENBANK Accession No. NT_010194.16 truncated from nucleotides 43281289 to 43314403. In certain embodiments, the PK-M target nucleic acid has the nucleobase sequence set forth in SEQ ID NO: 82 (GENBANK Accession No. NM_002654.4).

[0190] h. MAPT

[0191] In certain embodiments, oligomeric compounds comprise or consist of a modified oligonucleotide that is complementary to a target nucleic acid encoding MAPT, or a portion thereof. In certain embodiments, the MAPT target nucleic acid has the sequence set forth in SEQ ID NO: 83 (GENBANK Accession No. NT_010783.15 truncated from nucleotides 9240000 to 9381000. In certain embodiments, the MAPT target nucleic acid has the nucleobase sequence set forth in SEQ ID NO: 84 (GENBANK Accession No. NM_001123066.3).

[0192] i. LRP8

[0193] In certain embodiments, oligomeric compounds comprise or consist of a modified oligonucleotide that is complementary to a target nucleic acid encoding LRP8, or a portion thereof. In certain embodiments, the LRP8 target nucleic acid has the sequence set forth in SEQ ID NO: 85 (the complement of GENBANK Accession No. NT_032977.7 truncated from nucleotides 7530205 to 7613614. In certain embodiments, the LRP8 target nucleic acid has the nucleobase sequence set forth in SEQ ID NO: 86 (GENBANK Accession No. NM_004631.3).

[0194] j. CLN3

[0195] In certain embodiments, oligomeric compounds comprise or consist of a modified oligonucleotide that is complementary to a target nucleic acid encoding CLN3, or a portion thereof. In certain embodiments, the CLN3 target nucleic acid has the sequence set forth in SEQ ID NO: 87 (the complement of GENBANK Accession No: NT_010393.16 truncated from nucleotides 28427600 to 28444620). In certain embodiments, the CLN3 target nucleic acid has the sequence set forth in SEQ ID NO: 89 (GENBANK accession number NM_001042432.1), SEQ ID NO: 90 (GENBANK accession number NM_000086.2), or SEQ ID NO: 91 (GENBANK accession number NM_001286110.1).

[0196] k. IKBKAP In certain embodiments, oligomeric compounds comprise or consist of a modified oligonucleotide that is complementary to a target nucleic acid encoding IKBKAP, or a portion thereof. In certain embodiments, the IKBKAP target nucleic acid has the sequence set forth in SEQ ID NO: 92 (the complement of GENBANK Accession No. NT_008470.16 truncated from nucleotides 13290828 to 13358424. In certain embodiments, the IKBKAP target nucleic acid has the nucleobase sequence set forth in SEQ ID NO: 93 (GENBANK Accession No. NM_003640.4).

[0197] l. USH1C

[0198] In certain embodiments, oligomeric compounds comprise or consist of a modified oligonucleotide that is complementary to a target nucleic acid encoding USH1C, or a portion thereof. In certain embodiments, the USH1C target nucleic acid has the sequence set forth in SEQ ID NO: 94 (the complement of GENBANK Accession No. NT_009237.18 truncated from nucleotides 17454440 to 17506950. In certain embodiments, the USH1C target nucleic acid has the nucleobase sequence set forth in SEQ ID NO: 95 (GENBANK Accession No. NM_005709.3), or SEQ ID NO: 96 (NM 153676.3).

[0199] m. LMNA

[0200] In certain embodiments, oligomeric compounds comprise or consist of a modified oligonucleotide that is complementary to a target nucleic acid encoding LMNA, or a portion thereof. In certain embodiments, the LMNA target nucleic acid has the sequence set forth in SEQ ID NO: 97 (GENBANK Accession No. NT_079484.1 truncated from nucleotides 2533930 to 2560103. In certain embodiments, the LMNA target nucleic acid has the nucleobase sequence set forth in SEQ ID NO: 98 (GENBANK Accession No. NM_170707.1).

[0201] n. Dysferlin

[0202] In certain embodiments, oligomeric compounds comprise or consist of a modified oligonucleotide that is complementary to a target nucleic acid encoding Dysferlin, or a portion thereof. In certain embodiments, the Dysferlin target nucleic acid has the sequence set forth in SEQ ID NO: 99 (ENSEMBL Accession No. ENSG00000135636.14 from ENSEMBL version 99: January 2020 located on the forward strand of Chromosome 2 from positions 71,453,722 to 71,686,768. In certain embodiments, the Dysferlin target nucleic acid has the nucleobase sequence set forth in SEQ ID NO: 100 (GENBANK Accession No. NM_003494.1).

[0203] o. TGFBR1

[0204] In certain embodiments, oligomeric compounds comprise or consist of a modified oligonucleotide that is complementary to a target nucleic acid encoding TGFBR1, or a portion thereof. In certain embodiments, the TGFBR1 target nucleic acid has the sequence set forth in SEQ ID NO: 101 (GENBANK Accession No. NT_008470.17 truncated from nucleotides 9186000 to 9239000. In certain embodiments, the TGFBR1 target nucleic acid has the nucleobase sequence set forth in SEQ ID NO: 102 (GENBANK Accession No. NM_004612.2).

[0205] p. C5

[0206] In certain embodiments, oligomeric compounds comprise or consist of a modified oligonucleotide that is complementary to a target nucleic acid encoding C5, or a portion thereof. In certain embodiments, the C5 target nucleic acid has the sequence set forth in SEQ ID NO: 103 (the complement of GENBANK Accession No. NC_000009.12 truncated from nucleotides 120949001 to 121078000. In certain embodiments, the C5 target nucleic acid has the nucleobase sequence set forth in SEQ ID NO: 104 (GENBANK Accession No. NM_001735.2).

[0207] q. PKD1

[0208] In certain embodiments, oligomeric compounds comprise or consist of a modified oligonucleotide that is complementary to a target nucleic acid encoding PKD1, or a portion thereof. In certain embodiments, the PKD1 target nucleic acid has the sequence set forth in SEQ ID NO: 105 (the complement of GENBANK Accession No. NT_010393.16 truncated from nucleotides 2077700 to 2126900. In certain embodiments, the PKD1 target nucleic acid has the nucleobase sequence set forth in SEQ ID NO: 106 (GENBANK Accession No. NM_000296.3).

[0209] r. ATXN1

[0210] In certain embodiments, oligomeric compounds comprise or consist of a modified oligonucleotide that is complementary to a target nucleic acid encoding ATXN1, or a portion thereof. In certain embodiments, the ATXN1 target nucleic acid has the sequence set forth in SEQ ID NO: 107 (GENBANK Accession No. NM_000332.3). In certain embodiments, the ATXN1 target nucleic acid has the sequence set forth in or in SEQ ID NO: 108 (the complement of GENBANK Accession No. NC_000006.12 truncated from nucleotides 16296001 to 16764000). In certain embodiments, the ATXN1 target nucleic acid has the sequence set forth in SEQ ID NO: 109 (GENBANK Accession No. NM_001128164.1).

[0211] s. ATXN7

[0212] In certain embodiments, oligomeric compounds comprise or consist of a modified oligonucleotide that is complementary to a target nucleic acid encoding ATXN7, or a portion thereof. In certain embodiments, the ATXN7 target nucleic acid has the sequence set forth in SEQ ID NO: 110 (GENBANK Accession No. NT_022517.17 truncated from nucleotides 63789000 to 63/931,000. In certain embodiments, the ATXN7 target nucleic acid has the nucleobase sequence set forth in SEQ ID NO: 111 (GENBANK Accession No. NM_000333.3).

[0213] t. CACNA1A

[0214] In certain embodiments, oligomeric compounds comprise or consist of a modified oligonucleotide that is complementary to a target nucleic acid encoding CACNA1A, or a portion thereof. In certain embodiments, the CACNA1A target nucleic acid has the sequence set forth in SEQ ID NO: 112 (the complement of GENBANK Accession No. NC_000019.10 truncated from nucleotides 13203001 to 13509000. In certain embodiments, the CACNA1A target nucleic acid has the nucleobase sequence set forth in SEQ ID NO: 113 (GENBANK Accession No. NM_000068.3).

[0215] u. HTT

[0216] In certain embodiments, oligomeric compounds comprise or consist of a modified oligonucleotide that is complementary to a target nucleic acid encoding HTT, or a portion thereof. In certain embodiments, the HTT target nucleic acid has the sequence set forth in SEQ ID NO: 114 (GENBANK Accession No. NC_000004.12 truncated from nucleotides 3072001 to 3247000. In certain embodiments, the HTT target nucleic acid has the nucleobase sequence set forth in SEQ ID NO: 115 (GENBANK Accession No. NM_002111.8).

[0217] v. ATN1

[0218] In certain embodiments, oligomeric compounds comprise or consist of a modified oligonucleotide that is complementary to a target nucleic acid encoding ATN1, or a portion thereof. In certain embodiments, the ATN1 target nucleic acid has the sequence set forth in SEQ ID NO: 116 (GENBANK Accession No. NC_000012.12 truncated from nucleotides 6923463 to 6943321. In certain embodiments, the ATN1 target nucleic acid has the nucleobase sequence set forth in SEQ ID NO: 117 (GENBANK Accession No. NM_001007026.1).

[0219] w. TBP

[0220] In certain embodiments, oligomeric compounds comprise or consist of a modified oligonucleotide that is complementary to a target nucleic acid encoding TBP, or a portion thereof. In certain embodiments, the TBP nucleic acid has the sequence set forth in SEQ ID NO: 118 (ENSEMBL Accession No. ENSG00000112592.14 from ENSEMBL version 99: January 2020 located on the forward strand of Chromosome 6 from positions 170,554,302-170,572,870. In certain embodiments, the TBP target nucleic acid has the nucleobase sequence set forth in SEQ ID NO: 119 (GENBANK Accession No. NM_001172085.1).

[0221] x. IL-1RAP

[0222] In certain embodiments, oligomeric compounds comprise or consist of a modified oligonucleotide that is complementary to a target nucleic acid encoding IL-1RAP, or a portion thereof. In certain embodiments, the IL-1RAP target nucleic acid has the sequence set forth in SEQ ID NO: 120 (GENBANK Accession No. NT_022171.13 truncated from nucleotides 4836026 to 4862758. In certain embodiments, the IL-1RAP target nucleic acid has the nucleobase sequence set forth in SEQ ID NO: 121 (GENBANK Accession No. NM_000877.2).

[0223] B. Certain Target Nucleic Acids in Certain Tissues

[0224] In certain embodiments, oligomeric compounds comprise or consist of an oligonucleotide comprising a portion that is complementary to a target nucleic acid, wherein the target nucleic acid is expressed in a pharmacologically relevant tissue. In certain embodiments, the pharmacologically relevant tissues are the cells and tissues that comprise the central nervous system (CNS). Such tissues include brain tissues, such as, spinal cord, cortex, and coronal brain tissue.

[0225] VI. Certain Pharmaceutical Compositions

[0226] In certain embodiments, described herein are pharmaceutical compositions comprising one or more oligomeric compounds. In certain embodiments, the one or more oligomeric compounds each consists of a modified oligonucleotide. In certain embodiments, the pharmaceutical composition comprises a pharmaceutically acceptable diluent or carrier. In certain embodiments, a pharmaceutical composition comprises or consists of a sterile saline solution and one or more oligomeric compound. In certain embodiments, the sterile saline is pharmaceutical grade saline. In certain embodiments, a pharmaceutical composition comprises or consists of one or more oligomeric compound and sterile water. In certain embodiments, the sterile water is pharmaceutical grade water. In certain embodiments, a pharmaceutical composition comprises or consists of one or more oligomeric compound and phosphate-buffered saline (PBS). In certain embodiments, the sterile PBS is pharmaceutical grade PBS. In certain embodiments, a pharmaceutical composition comprises or consists of one or more oligomeric compound and artificial cerebrospinal fluid (“artificial CSF” or “aCSF”). In certain embodiments, the artificial cerebrospinal fluid is pharmaceutical grade.

[0227] In certain embodiments, a pharmaceutical composition comprises a modified oligonucleotide and artificial cerebrospinal fluid. In certain embodiments, a pharmaceutical composition consists of a modified oligonucleotide and artificial cerebrospinal fluid. In certain embodiments, a pharmaceutical composition consists essentially of a modified oligonucleotide and artificial cerebrospinal fluid. In certain embodiments, the artificial cerebrospinal fluid is pharmaceutical grade.

[0228] In certain embodiments, pharmaceutical compositions comprise one or more oligomeric compound and one or more excipients. In certain embodiments, excipients are selected from water, salt solutions, alcohol, polyethylene glycols, gelatin, lactose, amylase, magnesium stearate, talc, silicic acid, viscous paraffin, hydroxymethylcellulose and polyvinylpyrrolidone.

[0229] In certain embodiments, oligomeric compounds may be admixed with pharmaceutically acceptable active and/or inert substances for the preparation of pharmaceutical compositions or formulations. Compositions and methods for the formulation of pharmaceutical compositions depend on a number of criteria, including, but not limited to, route of administration, extent of disease, or dose to be administered.

[0230] In certain embodiments, pharmaceutical compositions comprising an oligomeric compound encompass any pharmaceutically acceptable salts of the oligomeric compound, esters of the oligomeric compound, or salts of such esters. In certain embodiments, pharmaceutical compositions comprising oligomeric compounds comprising one or more oligonucleotide, upon administration to a subject, including a human, are capable of providing (directly or indirectly) the biologically active metabolite or residue thereof. Accordingly, for example, the disclosure is also drawn to pharmaceutically acceptable salts of oligomeric compounds, prodrugs, pharmaceutically acceptable salts of such prodrugs, and other bioequivalents. Suitable pharmaceutically acceptable salts include, but are not limited to, sodium and potassium salts. In certain embodiments, prodrugs comprise one or more conjugate group attached to an oligonucleotide, wherein the conjugate group is cleaved by endogenous nucleases within the body. In certain embodiments, prodrugs comprise one or more conjugate group attached to an oligonucleotide, wherein the conjugate group is cleaved by endogenous nucleases within the body.

[0231] Lipid moieties have been used in nucleic acid therapies in a variety of methods. In certain such methods, the nucleic acid, such as an oligomeric compound, is introduced into preformed liposomes or lipoplexes made of mixtures of cationic lipids and neutral lipids. In certain methods, DNA complexes with mono- or poly-cationic lipids are formed without the presence of a neutral lipid. In certain embodiments, a lipid moiety is selected to increase distribution of a pharmaceutical agent to a particular cell or tissue. In certain embodiments, a lipid moiety is selected to increase distribution of a pharmaceutical agent to fat tissue. In certain embodiments, a lipid moiety is selected to increase distribution of a pharmaceutical agent to muscle tissue.

[0232] In certain embodiments, pharmaceutical compositions comprise a delivery system. Examples of delivery systems include, but are not limited to, liposomes and emulsions. Certain delivery systems are useful for preparing certain pharmaceutical compositions including those comprising hydrophobic compounds. In certain embodiments, certain organic solvents such as dimethylsulfoxide are used.

[0233] In certain embodiments, pharmaceutical compositions comprise one or more tissue-specific delivery molecules designed to deliver the one or more pharmaceutical agents comprising an oligomeric compound provided herein to specific tissues or cell types. For example, in certain embodiments, pharmaceutical compositions include liposomes coated with a tissue-specific antibody.

[0234] In certain embodiments, pharmaceutical compositions comprise a co-solvent system. Certain of such co-solvent systems comprise, for example, benzyl alcohol, a nonpolar surfactant, a water-miscible organic polymer, and an aqueous phase. In certain embodiments, such co-solvent systems are used for hydrophobic compounds. A non-limiting example of such a co-solvent system is the VPD co-solvent system, which is a solution of absolute ethanol comprising 3% w/v benzyl alcohol, 8% w/v of the nonpolar surfactant Polysorbate 80™ and 65% w/v polyethylene glycol 300. The proportions of such co-solvent systems may be varied considerably without significantly altering their solubility and toxicity characteristics. Furthermore, the identity of co-solvent components may be varied: for example, other surfactants may be used instead of Polysorbate 80™; the fraction size of polyethylene glycol may be varied; other biocompatible polymers may replace polyethylene glycol, e.g., polyvinyl pyrrolidone; and other sugars or polysaccharides may substitute for dextrose.

[0235] In certain embodiments, pharmaceutical compositions are prepared for oral administration. In certain embodiments, pharmaceutical compositions are prepared for buccal administration. In certain embodiments, a pharmaceutical composition is prepared for administration by injection (e.g., intravenous, subcutaneous, intramuscular, intrathecal (IT), intracerebroventricular (ICV), etc.). In certain of such embodiments, a pharmaceutical composition comprises a carrier and is formulated in aqueous solution, such as water or physiologically compatible buffers such as Hanks's solution, Ringer's solution, or physiological saline buffer. In certain embodiments, other ingredients are included (e.g., ingredients that aid in solubility or serve as preservatives). In certain embodiments, injectable suspensions are prepared using appropriate liquid carriers, suspending agents and the like. Certain pharmaceutical compositions for injection are presented in unit dosage form, e.g., in ampoules or in multi-dose containers. Certain pharmaceutical compositions for injection are suspensions, solutions or emulsions in oily or aqueous vehicles, and may contain formulatory agents such as suspending, stabilizing and/or dispersing agents. Certain solvents suitable for use in pharmaceutical compositions for injection include, but are not limited to, lipophilic solvents and fatty oils, such as sesame oil, synthetic fatty acid esters, such as ethyl oleate or triglycerides, and liposomes.

[0236] Under certain conditions, certain compounds disclosed herein act as acids. Although such compounds may be drawn or described in protonated (free acid) form, or ionized and in association with a cation (salt) form, aqueous solutions of such compounds exist in equilibrium among such forms. For example, a phosphate linkage of an oligonucleotide in aqueous solution exists in equilibrium among free acid, anion and salt forms. Unless otherwise indicated, compounds described herein are intended to include all such forms. Moreover, certain oligonucleotides have several such linkages, each of which is in equilibrium. Thus, oligonucleotides in solution exist in an ensemble of forms at multiple positions all at equilibrium. The term “oligonucleotide” is intended to include all such forms. Drawn structures necessarily depict a single form. Nevertheless, unless otherwise indicated, such drawings are likewise intended to include corresponding forms. Herein, a structure depicting the free acid of a compound followed by the term “or a salt thereof” expressly includes all such forms that may be fully or partially protonated/de-protonated/in association with a cation. In certain instances, one or more specific cation is identified.

[0237] In certain embodiments, modified oligonucleotides or oligomeric compounds are in aqueous solution with sodium. In certain embodiments, modified oligonucleotides or oligomeric compounds are in aqueous solution with potassium. In certain embodiments, modified oligonucleotides or oligomeric compounds are in PBS. In certain embodiments, modified oligonucleotides or oligomeric compounds are in water. In certain such embodiments, the pH of the solution is adjusted with NaOH and/or HCl to achieve a desired pH.

[0238] Herein, certain specific doses are described. A dose may be in the form of a dosage unit. For clarity, a dose (or dosage unit) of a modified oligonucleotide or an oligomeric compound in milligrams indicates the mass of the free acid form of the modified oligonucleotide or oligomeric compound. As described above, in aqueous solution, the free acid is in equilibrium with anionic and salt forms. However, for the purpose of calculating dose, it is assumed that the modified oligonucleotide or oligomeric compound exists as a solvent-free, sodium-acetate free, anhydrous, free acid. For example, where a modified oligonucleotide or an oligomeric compound is in solution comprising sodium (e.g., saline), the modified oligonucleotide or oligomeric compound may be partially or fully de-protonated and in association with Na+ ions. However, the mass of the protons are nevertheless counted toward the weight of the dose, and the mass of the Na+ ions are not counted toward the weight of the dose. Thus, for example, a dose, or dosage unit, of 10 mg of Compound No. 1263789, Compound No. 1287717, Compound No. 1287745, and Compound No. 1358996 equals the number of fully protonated molecules that weighs 10 mg. This would be equivalent to 10.53 mg of solvent-free, sodium acetate-free, anhydrous sodiated Compound No. 1263789, 10.53 mg of solvent-free, sodium acetate-free, anhydrous sodiated Compound No. 1287717, 10.52 mg of solvent-free, sodium acetate-free, anhydrous sodiated Compound No. 1287745, and 10.51 mg of solvent-free, sodium acetate-free, anhydrous sodiated Compound No. 1358996. When an oligomeric compound comprises a conjugate group, the mass of the conjugate group is included in calculating the dose of such oligomeric compound. If the conjugate group also has an acid, the conjugate group is likewise assumed to be fully protonated for the purpose of calculating dose.

[0239] VI. Certain Comparator Compositions

[0240] In certain embodiments, Spinraza® (generic name nusinersen; Compound No. 396443), approved for treatment of SMA, is a comparator compound (See, e.g., Chiroboga, et al., Neurology, 86(10): 890-897, 2016; Finkel, et al., Lancet, 338(10063): 3017-3026, 2016; Finkel, et al., N. Engl. J. Med., 377(18):1723-1732 2017; Mercuri, et al., N. Engl. J. Med., 378(7):625-635, 2018; Montes, et al., Muscle Nerve. 60(4): 409-414, 2019; Darras, et al., Neurology, 92(21):e2492-e2506, 2019). Spinraza® was previously described in WO2010120820, incorporated herein by reference, and has a sequence (from 5′ to 3′) of TCACTTTCATAATGCTGG (SEQ ID NO: 42), wherein each nucleoside comprises a 2′-MOE sugar moiety, each internucleoside linkage is a phosphorothioate internucleoside linkage, and each cytosine is a 5-methyl cytosine.

[0241] In certain embodiments, Compound No. 387954 is a comparator compound. Compound No. 387954 was previously described in WO 2014/179620, incorporated herein by reference. Compound No. 387954 has a sequence (from 5′ to 3′) of ATTCACTTTCATAATGCTGG (SEQ ID NO: 45), wherein each nucleoside comprises a 2′-MOE sugar moiety, each internucleoside linkage is a phosphorothioate internucleoside linkage, and each cytosine is a 5-methyl cytosine.

[0242] In certain embodiments, Compound No. 396442 is a comparator compound. Compound No. 396442 was previously described in WO 2010/120820, incorporated herein by reference. Compound No. 396442 has a sequence (from 5′ to 3′) of CACTTTCATAATGCTGGC (SEQ ID NO: 38), wherein each nucleoside comprises a 2′-MOE sugar moiety, each internucleoside linkage is a phosphorothioate internucleoside linkage, and each cytosine is a 5-methyl cytosine.

[0243] In certain embodiments, Compound No. 443305 is a comparator compound. Compound No. 443305 was previously described in WO 2018/014041, incorporated herein by reference. Compound No. 443305 has a sequence (from 5′ to 3′) of TCACTTTCATAATGCTGG (SEQ ID NO: 42), wherein each nucleoside comprises a 2′-NMA sugar moiety, each internucleoside linkage is a phosphorothioate internucleoside linkage, and each cytosine is a 5-methyl cytosine.

[0244] In certain embodiments, Compound No. 819735 is a comparator compound. Compound No. 819735 was previously described in WO 2018/014041, incorporated herein by reference. Compound No. 819735 has a sequence (from 5′ to 3′) of CACTTTCATAATGCTGGC (SEQ ID NO: 38), wherein each nucleoside comprises a 2′-NMA sugar moiety, each internucleoside linkage is a phosphorothioate internucleoside linkage, and each cytosine is a 5-methyl cytosine.

### Certain Comparator Compositions

| | Nucleo- | | Inter- | | |
|---|---|---|---|---|---|
| | base | | nucleo- | | |
| | Sequence | | side | SEQ | |
| Compound | (5′ to | Sugar | Linkage | ID | Reference |
| Number | 3′) | Motif | Motif | NO: | Number |
| 396443 | TCACTTTCA | Full 2′- | Full PS | 42 | WO 2010/ |
| | TAATGCTGG | MOE | | | 120820 |
| 387954 | ATTCACTTT | Full 2′- | Full PS | 45 | WO 2014/ |
| | CATAATGCT | MOE | | | 179620 |
| | GG | | | | |
| 396442 | CACTTTCAT | Full 2′- | Full PS | 38 | WO 2010/ |
| | AATGCTGGC | MOE | | | 120820 |
| 443305 | TCACTTTCA | Full 2′- | Full PS | 42 | WO 2018/ |
| | TAATGCTGG | NMA | | | 014041 |
| 819735 | CACTTTCAT | Full 2′- | Full PS | 38 | WO 2018/ |
| | AATGCTGGC | NMA | | | 014041 |

[0246] In certain embodiments, compounds described herein having certain internucleoside and/or sugar motifs are superior relative to compounds described in WO 2007/002390, WO2010/120820, WO 2015/161170, and WO 2018/014041, and because they demonstrate one or more improved properties, such as, potency, efficacy, and/or tolerability.

### Nonlimiting Disclosure and Incorporation by Reference

[0247] Each of the literature and patent publications listed herein is incorporated by reference in its entirety. While certain compounds, compositions and methods described herein have been described with specificity in accordance with certain embodiments, the following examples serve only to illustrate the compounds described herein and are not intended to limit the same. Each of the references, GenBank accession numbers, and the like recited in the present application is incorporated herein by reference in its entirety.

[0248] Although the sequence listing accompanying this filing identifies each sequence as either “RNA” or “DNA” as required, in reality, those sequences may be modified with any combination of chemical modifications. One of skill in the art will readily appreciate that such designation as “RNA” or “DNA” to describe modified oligonucleotides is, in certain instances, arbitrary. For example, an oligonucleotide comprising a nucleoside comprising a 2′-OH sugar moiety and a thymine base could be described as a DNA having a modified sugar moiety (2′-OH in place of one 2′-H of DNA) or as an RNA having a modified base (thymine (methylated uracil) in place of a uracil of RNA). Accordingly, nucleic acid sequences provided herein, including, but not limited to those in the sequence listing, are intended to encompass nucleic acids containing any combination of natural or modified RNA and/or DNA, including, but not limited to such nucleic acids having modified nucleobases. By way of further example and without limitation, an oligomeric compound having the nucleobase sequence “ATCGATCG” encompasses any oligomeric compounds having such nucleobase sequence, whether modified or unmodified, including, but not limited to, such compounds comprising RNA bases, such as those having sequence “AUCGAUCG” and those having some DNA bases and some RNA bases such as “AUCGATCG” and oligomeric compounds having other modified nucleobases, such as “AT^{m}CGAUCG,” wherein ^{m}C indicates a cytosine base comprising a methyl group at the 5-position.

[0249] Certain compounds described herein (e.g., modified oligonucleotides) have one or more asymmetric center and thus give rise to enantiomers, diastereomers, and other stereoisomeric configurations that may be defined, in terms of absolute stereochemistry, as (R) or (S), as a or β such as for sugar anomers, or as (D) or (L), such as for amino acids, etc. Compounds provided herein that are drawn or described as having certain stereoisomeric configurations include only the indicated compounds. Compounds provided herein that are drawn or described with undefined stereochemistry include all such possible isomers, including their stereorandom and optically pure forms, unless specified otherwise. Likewise, all cis- and trans-isomers and tautomeric forms of the compounds herein are also included unless otherwise indicated. Oligomeric compounds described herein include chirally pure or enriched mixtures as well as racemic mixtures. For example, oligomeric compounds having a plurality of phosphorothioate internucleoside linkages include such compounds in which chirality of the phosphorothioate internucleoside linkages is controlled or is random. Unless otherwise indicated, compounds described herein are intended to include corresponding salt forms.

[0250] The compounds described herein include variations in which one or more atoms are replaced with a non-radioactive isotope or radioactive isotope of the indicated element. For example, compounds herein that comprise hydrogen atoms encompass all possible deuterium substitutions for each of the ¹H hydrogen atoms. Isotopic substitutions encompassed by the compounds herein include but are not limited to: ²H or ³H in place of ¹H, ¹³C or ¹⁴C in place of ¹²C, ¹⁵N in place of ¹⁴N, ¹⁷O or ¹⁸O in place of ¹⁶O and ³³S, ³⁴S, ³⁵S, or ³⁶S in place of ³²S. In certain embodiments, non-radioactive isotopic substitutions may impart new properties on the oligomeric compound that are beneficial for use as a therapeutic or research tool. In certain embodiments, radioactive isotopic substitutions may make the compound suitable for research or diagnostic purposes such as imaging.

### EXAMPLES

[0251] The following examples illustrate certain embodiments of the present disclosure and are not limiting. Moreover, where specific embodiments are provided, the inventors have contemplated generic application of those specific embodiments.

### Example 1: Design of Modified Oligonucleotides Complementary to a Human SMN2 Nucleic Acid

[0252] Modified oligonucleotides complementary to a human SMN2 nucleic acid were designed and synthesized as indicated in the tables below.

[0253] The modified oligonucleotides in the tables below are 16, 17, 18, 19, or 20 nucleosides in length, as specified. The modified oligonucleotides comprise 2′-MOE sugar moieties, 2′-NMA sugar moieties, cEt sugar moieties, 2′-OMe sugar moieties, and/or 2′-β-D-deoxyribosyl sugar moieties, as specified. Each internucleoside linkage throughout the modified oligonucleotides is either a phosphorothioate internucleoside linkage or a phosphodiester internucleoside linkage, as specified. Cytosines are either non-methylated cytosines or 5-methyl cytosines, as specified.

[0254] Each modified oligonucleotide listed in the tables below is 100% complementary to SEQ ID NO: 1 (GENBANK Accession No. NT_006713.14 truncated from nucleotides 19939708 to 19967777), unless specifically stated otherwise. Non-complementary nucleobases are specified in the Nucleobase Sequence column in underlined, bold, italicized font Each modified oligonucleotide listed in the tables below targets an active site on the SMN2 transcript for inclusion of exon 7. “Start site” indicates the 5′-most nucleoside to which the modified oligonucleotide is complementary in the target nucleic acid sequence. “Stop site” indicates the 3′-most nucleoside to which the modified oligonucleotide is complementary in the target nucleic acid sequence.

### Table 1

[0255] The modified oligonucleotides in Table 1 below are 16, 17, 18, 19 or 20 nucleosides in length. Each nucleoside comprises a 2′-MOE sugar moiety. The sugar motif for each modified oligonucleotide is provided in the Sugar Motif column, wherein each ‘e’ represents a 2′-MOE sugar moiety. Each internucleoside linkage is either a phosphorothioate internucleoside linkage or a phosphodiester internucleoside linkage. The internucleoside linkage motif for each modified oligonucleotide is provided in the Internucleoside Linkage Motif column, wherein each ‘s’ represents a phosphorothioate internucleoside linkage, and each ‘o’ represents a phosphodiester internucleoside linkage. Each cytosine is a 5-methyl cytosine.

[0256] Each modified oligonucleotide listed in Table 1 below is 100% complementary to SEQ ID NO: 1 (GENBANK Accession No. NT_006713.14 truncated from nucleotides 19939708 to 19967777), unless specifically stated otherwise. Non-complementary nucleobases are specified in the Nucleobase Sequence column in [symbol] “Start site” indicates the 5′-most nucleoside to which the modified oligonucleotide is complementary in the target nucleic acid sequence. “Stop site” indicates the 3′-most nucleoside to which the modified oligonucleotide is complementary in the target nucleic acid sequence.

TABLE 1
2′-MOE modified oligonucleotides with PS or mixed PS/PO internucleoside linkages

| | | | | SEQ | SEQ | |
|---|---|---|---|---|---|---|
| | | | | ID | ID | |
| | | | Internucleoside | No: 1 | No: 1 | SEQ |
| Compound | Nucleobase Sequence | | Linkage Motif | Start | Stop | ID |
| Number | (5′ to 3′) | Sugar Motif (5′ to 3′) | (5′ to 3′) | Site | Site | No. |
| 1287063 | ACTTTCATAATGCTGGCAG | eeeeeeeeeeeeeeeeeee | ssssssssssssssssss | 27059 | 27077 | 32 |
| 1287048 | CACTTTCATAATGCTGGCAG | eeeeeeeeeeeeeeeeeeee | sssssssssssssssssss | 27059 | 27078 | 33 |
| 1287064 | CACTTTCATAATGCTGGCA | eeeeeeeeeeeeeeeeeee | ssssssssssssssssss | 27060 | 27078 | 34 |
| 1287049 | TCACTTTCATAATGCTGGCA | eeeeeeeeeeeeeeeeeeee | sssssssssssssssssss | 27060 | 27079 | 35 |
| 1210340 | CTTTCATAATGCTGGC | eeeeeeeeeeeeeeee | sssssssssssssss | 27061 | 27076 | 36 |
| 1212868 | CTTTCATAATGCTGGC | eeeeeeeeeeeeeeee | sssssssssooooss | 27061 | 27076 | 36 |
| 1212867 | CTTTCATAATGCTGGC | eeeeeeeeeeeeeeee | ssssssssoooosss | 27061 | 27076 | 36 |
| 1212863 | CTTTCATAATGCTGGC | eeeeeeeeeeeeeeee | ssssssooossssss | 27061 | 27076 | 36 |
| 1212866 | CTTTCATAATGCTGGC | eeeeeeeeeeeeeeee | ssssssoooosssss | 27061 | 27076 | 36 |
| 1212861 | CTTTCATAATGCTGGC | eeeeeeeeeeeeeeee | sssssooooosssss | 27061 | 27076 | 36 |
| 1212860 | CTTTCATAATGCTGGC | eeeeeeeeeeeeeeee | sssssoooooossss | 27061 | 27076 | 36 |
| 1212865 | CTTTCATAATGCTGGC | eeeeeeeeeeeeeeee | ssssoooosssssss | 27061 | 27076 | 36 |
| 1212859 | CTTTCATAATGCTGGC | eeeeeeeeeeeeeeee | ssssooooooossss | 27061 | 27076 | 36 |
| 1212851 | CTTTCATAATGCTGGC | eeeeeeeeeeeeeeee | sssosssosssosss | 27061 | 27076 | 36 |
| 1212850 | CTTTCATAATGCTGGC | eeeeeeeeeeeeeeee | ssosssssssssoss | 27061 | 27076 | 36 |
| 1212852 | CTTTCATAATGCTGGC | eeeeeeeeeeeeeeee | ssossossossosss | 27061 | 27076 | 36 |
| 1212853 | CTTTCATAATGCTGGC | eeeeeeeeeeeeeeee | ssossossosososs | 27061 | 27076 | 36 |
| 1212854 | CTTTCATAATGCTGGC | eeeeeeeeeeeeeeee | ssososososososs | 27061 | 27076 | 36 |
| 1212864 | CTTTCATAATGCTGGC | eeeeeeeeeeeeeeee | ssoooosssssssss | 27061 | 27076 | 36 |
| 1212855 | CTTTCATAATGCTGGC | eeeeeeeeeeeeeeee | soossssssssooss | 27061 | 27076 | 36 |
| 1212856 | CTTTCATAATGCTGGC | eeeeeeeeeeeeeeee | sooosssssssooss | 27061 | 27076 | 36 |
| 1212857 | CTTTCATAATGCTGGC | eeeeeeeeeeeeeeee | sooossssssoooss | 27061 | 27076 | 36 |
| 1212858 | CTTTCATAATGCTGGC | eeeeeeeeeeeeeeee | soooosssssoooss | 27061 | 27076 | 36 |
| 1210339 | ACTTTCATAATGCTGGC | eeeeeeeeeeeeeeeee | ssssssssssssssss | 27061 | 27077 | 37 |
| 1212849 | ACTTTCATAATGCTGGC | eeeeeeeeeeeeeeeee | ssssssssssooooss | 27061 | 27077 | 37 |
| 1212848 | ACTTTCATAATGCTGGC | eeeeeeeeeeeeeeeee | ssssssssoooossss | 27061 | 27077 | 37 |
| 1212845 | ACTTTCATAATGCTGGC | eeeeeeeeeeeeeeeee | sssssssooossssss | 27061 | 27077 | 37 |
| 1212844 | ACTTTCATAATGCTGGC | eeeeeeeeeeeeeeeee | ssssssoooossssss | 27061 | 27077 | 37 |
| 1212843 | ACTTTCATAATGCTGGC | eeeeeeeeeeeeeeeee | ssssssooooosssss | 27061 | 27077 | 37 |
| 1212842 | ACTTTCATAATGCTGGC | eeeeeeeeeeeeeeeee | sssssoooooosssss | 27061 | 27077 | 37 |
| 1212841 | ACTTTCATAATGCTGGC | eeeeeeeeeeeeeeeee | sssssooooooossss | 27061 | 27077 | 37 |
| 1212847 | ACTTTCATAATGCTGGC | eeeeeeeeeeeeeeeee | ssssoooossssssss | 27061 | 27077 | 37 |
| 1212832 | ACTTTCATAATGCTGGC | eeeeeeeeeeeeeeeee | ssossssssssssoss | 27061 | 27077 | 37 |
| 1212833 | ACTTTCATAATGCTGGC | eeeeeeeeeeeeeeeee | ssosssssossssoss | 27061 | 27077 | 37 |
| 1212834 | ACTTTCATAATGCTGGC | eeeeeeeeeeeeeeeee | ssosssosssossoss | 27061 | 27077 | 37 |
| 1212835 | ACTTTCATAATGCTGGC | eeeeeeeeeeeeeeeee | ssossossossososs | 27061 | 27077 | 37 |
| 1212836 | ACTTTCATAATGCTGGC | eeeeeeeeeeeeeeeee | ssososososososss | 27061 | 27077 | 37 |
| 1212846 | ACTTTCATAATGCTGGC | eeeeeeeeeeeeeeeee | ssoooossssssssss | 27061 | 27077 | 37 |
| 1212837 | ACTTTCATAATGCTGGC | eeeeeeeeeeeeeeeee | soosssssssssooss | 27061 | 27077 | 37 |
| 1212838 | ACTTTCATAATGCTGGC | eeeeeeeeeeeeeeeee | sooossssssssooss | 27061 | 27077 | 37 |
| 1212839 | ACTTTCATAATGCTGGC | eeeeeeeeeeeeeeeee | sooosssssssoooss | 27061 | 27077 | 37 |
| 1212840 | ACTTTCATAATGCTGGC | eeeeeeeeeeeeeeeee | soooossssssoooss | 27061 | 27077 | 37 |
| 1263814 | CACTTTCATAATGCTGGC | eeeeeeeeeeeeeeeeee | ssossssssssssssss | 27061 | 27078 | 38 |
| 1263816 | CACTTTCATAATGCTGGC | eeeeeeeeeeeeeeeeee | ssssossssssssssss | 27061 | 27078 | 38 |
| 1263818 | CACTTTCATAATGCTGGC | eeeeeeeeeeeeeeeeee | ssssssossssssssss | 27061 | 27078 | 38 |
| 1263820 | CACTTTCATAATGCTGGC | eeeeeeeeeeeeeeeeee | ssssssssossssssss | 27061 | 27078 | 38 |
| 1263822 | CACTTTCATAATGCTGGC | eeeeeeeeeeeeeeeeee | ssssssssssossssss | 27061 | 27078 | 38 |
| 1263824 | CACTTTCATAATGCTGGC | eeeeeeeeeeeeeeeeee | ssssssssssssossss | 27061 | 27078 | 38 |
| 1263826 | CACTTTCATAATGCTGGC | eeeeeeeeeeeeeeeeee | ssssssssssssssoss | 27061 | 27078 | 38 |
| 1210342 | CACTTTCATAATGCTGGC | eeeeeeeeeeeeeeeeee | ssosssssssssssoss | 27061 | 27078 | 38 |
| 1263778 | CACTTTCATAATGCTGGC | eeeeeeeeeeeeeeeeee | sossssssssssssoss | 27061 | 27078 | 38 |
| 1263781 | CACTTTCATAATGCTGGC | eeeeeeeeeeeeeeeeee | sosssssssssosssss | 27061 | 27078 | 38 |
| 1263783 | CACTTTCATAATGCTGGC | eeeeeeeeeeeeeeeeee | sosssssssosssssss | 27061 | 27078 | 38 |
| 1263785 | CACTTTCATAATGCTGGC | eeeeeeeeeeeeeeeeee | sosssssosssssssss | 27061 | 27078 | 38 |
| 1263787 | CACTTTCATAATGCTGGC | eeeeeeeeeeeeeeeeee | sosssosssssssssss | 27061 | 27078 | 38 |
| 1263789 | CACTTTCATAATGCTGGC | eeeeeeeeeeeeeeeeee | sososssssssssssss | 27061 | 27078 | 38 |
| 1263791 | CACTTTCATAATGCTGGC | eeeeeeeeeeeeeeeeee | ssssosssssssssoss | 27061 | 27078 | 38 |
| 1263793 | CACTTTCATAATGCTGGC | eeeeeeeeeeeeeeeeee | ssssssosssssssoss | 27061 | 27078 | 38 |
| 1263795 | CACTTTCATAATGCTGGC | eeeeeeeeeeeeeeeeee | ssssssssosssssoss | 27061 | 27078 | 38 |
| 1263797 | CACTTTCATAATGCTGGC | eeeeeeeeeeeeeeeeee | ssssssssssosssoss | 27061 | 27078 | 38 |
| 1263799 | CACTTTCATAATGCTGGC | eeeeeeeeeeeeeeeeee | ssssssssssssososs | 27061 | 27078 | 38 |
| 1263800 | CACTTTCATAATGCTGGC | eeeeeeeeeeeeeeeeee | soossssssssssssss | 27061 | 27078 | 38 |
| 1263802 | CACTTTCATAATGCTGGC | eeeeeeeeeeeeeeeeee | sssoossssssssssss | 27061 | 27078 | 38 |
| 1263804 | CACTTTCATAATGCTGGC | eeeeeeeeeeeeeeeeee | sssssoossssssssss | 27061 | 27078 | 38 |
| 1263806 | CACTTTCATAATGCTGGC | eeeeeeeeeeeeeeeeee | sssssssoossssssss | 27061 | 27078 | 38 |
| 1263808 | CACTTTCATAATGCTGGC | eeeeeeeeeeeeeeeeee | sssssssssoossssss | 27061 | 27078 | 38 |
| 1263810 | CACTTTCATAATGCTGGC | eeeeeeeeeeeeeeeeee | sssssssssssoossss | 27061 | 27078 | 38 |
| 1263812 | CACTTTCATAATGCTGGC | eeeeeeeeeeeeeeeeee | sssssssssssssooss | 27061 | 27078 | 38 |
| 1210343 | CACTTTCATAATGCTGGC | eeeeeeeeeeeeeeeeee | ssosssssosssssoss | 27061 | 27078 | 38 |
| 1212825 | CACTTTCATAATGCTGGC | eeeeeeeeeeeeeeeeee | sssssssooosssssss | 27061 | 27078 | 38 |
| 1212817 | CACTTTCATAATGCTGGC | eeeeeeeeeeeeeeeeee | soossssssssssooss | 27061 | 27078 | 38 |
| 1212824 | CACTTTCATAATGCTGGC | eeeeeeeeeeeeeeeeee | sssssssoooossssss | 27061 | 27078 | 38 |
| 1212826 | CACTTTCATAATGCTGGC | eeeeeeeeeeeeeeeeee | ssoooosssssssssss | 27061 | 27078 | 38 |
| 1212827 | CACTTTCATAATGCTGGC | eeeeeeeeeeeeeeeeee | ssssoooosssssssss | 27061 | 27078 | 38 |
| 1212828 | CACTTTCATAATGCTGGC | eeeeeeeeeeeeeeeeee | ssssssoooosssssss | 27061 | 27078 | 38 |
| 1212829 | CACTTTCATAATGCTGGC | eeeeeeeeeeeeeeeeee | ssssssssoooosssss | 27061 | 27078 | 38 |
| 1212830 | CACTTTCATAATGCTGGC | eeeeeeeeeeeeeeeeee | ssssssssssoooosss | 27061 | 27078 | 38 |
| 1212831 | CACTTTCATAATGCTGGC | eeeeeeeeeeeeeeeeee | sssssssssssooooss | 27061 | 27078 | 38 |
| 1212818 | CACTTTCATAATGCTGGC | eeeeeeeeeeeeeeeeee | sooosssssssssooss | 27061 | 27078 | 38 |
| 1212823 | CACTTTCATAATGCTGGC | eeeeeeeeeeeeeeeeee | ssssssooooossssss | 27061 | 27078 | 38 |
| 1212819 | CACTTTCATAATGCTGGC | eeeeeeeeeeeeeeeeee | sooossssssssoooss | 27061 | 27078 | 38 |
| 1212822 | CACTTTCATAATGCTGGC | eeeeeeeeeeeeeeeeee | ssssssoooooosssss | 27061 | 27078 | 38 |
| 1212820 | CACTTTCATAATGCTGGC | eeeeeeeeeeeeeeeeee | soooosssssssoooss | 27061 | 27078 | 38 |
| 1212821 | CACTTTCATAATGCTGGC | eeeeeeeeeeeeeeeeee | sssssooooooosssss | 27061 | 27078 | 38 |
| 1287065 | TCACTTTCATAATGCTGGC | eeeeeeeeeeeeeeeeeee | ssssssssssssssssss | 27061 | 27079 | 39 |
| 1210341 | ACTTTCATAATGCTGG | eeeeeeeeeeeeeeee | sssssssssssssss | 27062 | 27077 | 40 |
| 524403 | CACTTTCATAATGCTGG | eeeeeeeeeeeeeeeee | ssssssssssssssss | 27062 | 27078 | 41 |
| 1287121 | TCACTTTCATAATGCTGG | eeeeeeeeeeeeeeeeee | ssssssssssssssoss | 27062 | 27079 | 42 |
| 1287120 | TCACTTTCATAATGCTGG | eeeeeeeeeeeeeeeeee | sssssssssssssosss | 27062 | 27079 | 42 |
| 1287113 | TCACTTTCATAATGCTGG | eeeeeeeeeeeeeeeeee | sssssssssssssooss | 27062 | 27079 | 42 |
| 1287110 | TCACTTTCATAATGCTGG | eeeeeeeeeeeeeeeeee | ssssssssssssososs | 27062 | 27079 | 42 |
| 1287119 | TCACTTTCATAATGCTGG | eeeeeeeeeeeeeeeeee | sssssssssssosssss | 27062 | 27079 | 42 |
| 1364782 | TCACTTTCATAATGCTGG | eeeeeeeeeeeeeeeeee | sssssssssssososss | 27062 | 27079 | 42 |
| 1364777 | TCACTTTCATAATGCTGG | eeeeeeeeeeeeeeeeee | ssssssssssossosss | 27062 | 27079 | 42 |
| 1287118 | TCACTTTCATAATGCTGG | eeeeeeeeeeeeeeeeee | sssssssssosssssss | 27062 | 27079 | 42 |
| 1364783 | TCACTTTCATAATGCTGG | eeeeeeeeeeeeeeeeee | sssssssssosssosss | 27062 | 27079 | 42 |
| 1287109 | TCACTTTCATAATGCTGG | eeeeeeeeeeeeeeeeee | ssssssssosssssoss | 27062 | 27079 | 42 |
| 1364784 | TCACTTTCATAATGCTGG | eeeeeeeeeeeeeeeeee | ssssssssossssosss | 27062 | 27079 | 42 |
| 1287117 | TCACTTTCATAATGCTGG | eeeeeeeeeeeeeeeeee | sssssssosssssssss | 27062 | 27079 | 42 |
| 1287112 | TCACTTTCATAATGCTGG | eeeeeeeeeeeeeeeeee | sssssssoossssssss | 27062 | 27079 | 42 |
| 1287116 | TCACTTTCATAATGCTGG | eeeeeeeeeeeeeeeeee | sssssosssssssssss | 27062 | 27079 | 42 |
| 1287115 | TCACTTTCATAATGCTGG | eeeeeeeeeeeeeeeeee | sssosssssssssssss | 27062 | 27079 | 42 |
| 1287114 | TCACTTTCATAATGCTGG | eeeeeeeeeeeeeeeeee | sosssssssssssssss | 27062 | 27079 | 42 |
| 1287106 | TCACTTTCATAATGCTGG | eeeeeeeeeeeeeeeeee | sossssssssssssoss | 27062 | 27079 | 42 |
| 1287107 | TCACTTTCATAATGCTGG | eeeeeeeeeeeeeeeeee | sossssssossssssss | 27062 | 27079 | 42 |
| 1287108 | TCACTTTCATAATGCTGG | eeeeeeeeeeeeeeeeee | sososssssssssssss | 27062 | 27079 | 42 |
| 1287111 | TCACTTTCATAATGCTGG | eeeeeeeeeeeeeeeeee | soossssssssssssss | 27062 | 27079 | 42 |
| 1287066 | TTCACTTTCATAATGCTGG | eeeeeeeeeeeeeeeeeee | ssssssssssssssssss | 27062 | 27080 | 43 |
| 1287074 | TTCACTTTCATAATGCTGG | eeeeeeeeeeeeeeeeeee | sssssssssssssssoss | 27062 | 27080 | 43 |
| 1287071 | TTCACTTTCATAATGCTGG | eeeeeeeeeeeeeeeeeee | sssssssssssssososs | 27062 | 27080 | 43 |
| 1287073 | TTCACTTTCATAATGCTGG | eeeeeeeeeeeeeeeeeee | ssssssssosssssssss | 27062 | 27080 | 43 |
| 1287070 | TTCACTTTCATAATGCTGG | eeeeeeeeeeeeeeeeeee | ssssssssossssssoss | 27062 | 27080 | 43 |
| 1287072 | TTCACTTTCATAATGCTGG | eeeeeeeeeeeeeeeeeee | sossssssssssssssss | 27062 | 27080 | 43 |
| 1287067 | TTCACTTTCATAATGCTGG | eeeeeeeeeeeeeeeeeee | sosssssssssssssoss | 27062 | 27080 | 43 |
| 1287068 | TTCACTTTCATAATGCTGG | eeeeeeeeeeeeeeeeeee | sossssssosssssssss | 27062 | 27080 | 43 |
| 1287069 | TTCACTTTCATAATGCTGG | eeeeeeeeeeeeeeeeeee | sosossssssssssssss | 27062 | 27080 | 43 |
| 1287060 | ATTCACTTTCATAATGCTGG | eeeeeeeeeeeeeeeeeeee | ssssssssssssssssoss | 27062 | 27081 | 45 |
| 1287057 | ATTCACTTTCATAATGCTGG | eeeeeeeeeeeeeeeeeeee | sssssssssssssssooss | 27062 | 27081 | 45 |
| 1287054 | ATTCACTTTCATAATGCTGG | eeeeeeeeeeeeeeeeeeee | ssssssssssssssososs | 27062 | 27081 | 45 |
| 1287059 | ATTCACTTTCATAATGCTGG | eeeeeeeeeeeeeeeeeeee | sssssssssosssssssss | 27062 | 27081 | 45 |
| 1287053 | ATTCACTTTCATAATGCTGG | eeeeeeeeeeeeeeeeeeee | sssssssssossssssoss | 27062 | 27081 | 45 |
| 1287056 | ATTCACTTTCATAATGCTGG | eeeeeeeeeeeeeeeeeeee | ssssssssoosssssssss | 27062 | 27081 | 45 |
| 1287058 | ATTCACTTTCATAATGCTGG | eeeeeeeeeeeeeeeeeeee | sosssssssssssssssss | 27062 | 27081 | 45 |
| 1287050 | ATTCACTTTCATAATGCTGG | eeeeeeeeeeeeeeeeeeee | sossssssssssssssoss | 27062 | 27081 | 45 |
| 1287051 | ATTCACTTTCATAATGCTGG | eeeeeeeeeeeeeeeeeeee | sosssssssosssssssss | 27062 | 27081 | 45 |
| 1287052 | ATTCACTTTCATAATGCTGG | eeeeeeeeeeeeeeeeeeee | sososssssssssssssss | 27062 | 27081 | 45 |
| 1287055 | ATTCACTTTCATAATGCTGG | eeeeeeeeeeeeeeeeeeee | soossssssssssssssss | 27062 | 27081 | 45 |
| 1287075 | ATTCACTTTCATAATGCTG | eeeeeeeeeeeeeeeeeee | ssssssssssssssssss | 27063 | 27081 | 46 |
| 1287062 | AGATTCACTTTCATAATGCT | eeeeeeeeeeeeeeeeeeee | sssssssssssssssssss | 27064 | 27083 | 47 |
| 1287061 | GATTCACTTTCATAATGCTG | eeeeeeeeeeeeeeeeeeee | sssssssssssssssssss | 27063 | 27082 | 48 |
| 1287076 | GATTCACTTTCATAATGCT | eeeeeeeeeeeeeeeeeee | ssssssssssssssssss | 27064 | 27082 | 49 |
| 1287701 | TCACTTTCATAATGCTGGr | eeeeeeeeeeeeeeeeeee | ssssssssssssssssss | 27062 | 27079 | 50 |
| 1287702 | TCACTTTCATAATGCTGGA | eeeeeeeeeeeeeeeeeee | ssssssssssssssssss | 27062 | 27079 | 51 |

### Table 2

[0257] The modified oligonucleotides in Table 2 below are 16, 17, 18, 19 or 20 nucleosides in length. Each nucleoside comprises a 2′-NMA sugar moiety. The sugar motif for each modified oligonucleotide is provided in the Sugar Motif column, wherein each ‘n’ represents a 2′-NMA sugar moiety. Each internucleoside linkage is either a phosphorothioate internucleoside linkage or a phosphodiester internucleoside linkage. The internucleoside linkage motif for each modified oligonucleotide is provided in the Internucleoside Linkage Motif column, wherein each ‘s’ represents a phosphorothioate internucleoside linkage, and each ‘o’ represents a phosphodiester internucleoside linkage. Each cytosine is a 5-methyl cytosine.

[0258] Each modified oligonucleotide listed in Table 2 below is 100% complementary to SEQ ID NO: 1 (GENBANK Accession No. NT_006713.14 truncated from nucleotides 19939708 to 19967777). “Start site” indicates the 5′-most nucleoside to which the modified oligonucleotide is complementary in the target nucleic acid sequence. “Stop site” indicates the 3′-most nucleoside to which the modified oligonucleotide is complementary in the target nucleic acid sequence.

TABLE 2
2′-NMA modified oligonucleotides with PS or
mixed PS/PO internucleoside linkages

| | | | Inter- | | | |
|---|---|---|---|---|---|---|
| | | | nucleo- | SEQ | SEQ | |
| | Nucleo- | | side | ID | ID | |
| | base | Sugar | Linkage | No: | No: | |
| | Sequence | Motif | Motif | 1 | 1 | SEQ |
| Compound | (5′ to | (5′ to | (5′ to | Start | Stop | ID |
| Number | 3′) | 3′) | 3′) | Site | Site | No. |
| 1287127 | CACTTTC | nnnnnnn | sssssss | 27060 | 27078 | 34 |
| | ATAATGC | nnnnnnn | sssssss | | | |
| | TGGCA | nnnnn | ssss | | | |
| 1287122 | TCACTTT | nnnnnnn | sssssss | 27060 | 27079 | 35 |
| | CATAATG | nnnnnnn | sssssss | | | |
| | CTGGCA | nnnnnn | sssss | | | |
| 1212871 | CTTTCAT | nnnnnnn | sssssss | 27061 | 27076 | 36 |
| | AATGCTG | nnnnnnn | sssssss | | | |
| | GC | nn | s | | | |
| 1212869 | ACTTTCA | nnnnnnn | sssssss | 27061 | 27077 | 37 |
| | TAATGCT | nnnnnnn | sssssss | | | |
| | GGC | nnn | ss | | | |
| 1358996 | CACTTTC | nnnnnnn | sososss | 27061 | 27078 | 38 |
| | ATAATGC | nnnnnnn | sssssss | | | |
| | TGGC | nn | sss | | | |
| 1212873 | CACTTTC | nnnnnnn | ssossss | 27061 | 27078 | 38 |
| | ATAATGC | nnnnnnn | sssssss | | | |
| | TGGC | nnn | oss | | | |
| 1212874 | CACTTTC | nnnnnnn | ssossss | 27061 | 27078 | 38 |
| | ATAATGC | nnnnnnn | sosssss | | | |
| | TGGC | nn | oss | | | |
| 1212875 | CACTTTC | nnnnnnn | ssossso | 27061 | 27078 | 38 |
| | ATAATGC | nnnnnnn | sssosss | | | |
| | TGGC | nnn | oss | | | |
| 1212879 | CACTTTC | nnnnnnn | soossss | 27061 | 27078 | 38 |
| | ATAATGC | nnnnnnn | sssssso | | | |
| | TGGC | nnn | oss | | | |
| 1212880 | CACTTTC | nnnnnnn | sooosss | 27061 | 27078 | 38 |
| | ATAATGC | nnnnnnn | sssssso | | | |
| | TGGC | nnn | oss | | | |
| 1212881 | CACTTTC | nnnnnnn | sooosss | 27061 | 27078 | 38 |
| | ATAATGC | nnnnnnn | sssssoo | | | |
| | TGGC | nnnn | oss | | | |
| 1212885 | CACTTTC | nnnnnnn | sssssso | 27061 | 27078 | 38 |
| | ATAATGC | nnnnnnn | oooosss | | | |
| | TGGC | nnnn | sss | | | |
| 1212887 | CACTTTC | nnnnnnn | sssssss | 27061 | 27078 | 38 |
| | ATAATGC | nnnnnnn | ooossss | | | |
| | TGGC | nnnn | sss | | | |
| 1287128 | TCACTTT | nnnnnnn | sssssss | 27061 | 27079 | 39 |
| | CATAATG | nnnnnnn | sssssss | | | |
| | CTGGC | nnnnn | ssss | | | |
| 1212870 | CACTTTC | nnnnnnn | sssssss | 27062 | 27078 | 41 |
| | ATAATGC | nnnnnnn | sssssss | | | |
| | TGG | nnn | ss | | | |
| 1287132 | TCACTTT | nnnnnnn | sosssss | 27062 | 27079 | 42 |
| | CATAATG | nnnnnnn | sssssss | | | |
| | CTGG | nnnn | oss | | | |
| 1287133 | TCACTTT | nnnnnnn | sssssss | 27062 | 27079 | 42 |
| | CATAATG | nnnnnnn | sosssss | | | |
| | CTGG | nnnn | sss | | | |
| 1332246 | TCACTTT | nnnnnnn | sssssss | 27062 | 27079 | 42 |
| | CATAATG | nnnnnnn | sosssss | | | |
| | CTGG | nnnn | oss | | | |
| 1332265 | TCACTTT | nnnnnnn | sssssss | 27062 | 27079 | 42 |
| | CATAATG | nnnnnnn | sssssos | | | |
| | CTGG | nnnn | oss | | | |
| 1364778 | TCACTTT | nnnnnnn | sssssss | 27062 | 27079 | 42 |
| | CATAATG | nnnnnnn | ssssoso | | | |
| | CTGG | nnnn | sss | | | |
| 1364779 | TCACTTT | nnnnnnn | sssssss | 27062 | 27079 | 42 |
| | CATAATG | nnnnnnn | sssosso | | | |
| | CTGG | nnnn | sss | | | |
| 1364780 | TCACTTT | nnnnnnn | SSSSSSS | 27062 | 27079 | 42 |
| | CATAATG | nnnnnnn | SSOSSSO | | | |
| | CTGG | nnnn | SSS | | | |
| 1364781 | TCACTTT | nnnnnnn | SSSSSSS | 27062 | 27079 | 42 |
| | CATAATG | nnnnnnn | SOSSSSO | | | |
| | CTGG | nnnn | SSS | | | |
| 1287129 | TTCACTT | nnnnnnn | sssssss | 27062 | 27080 | 43 |
| | TCATAAT | nnnnnnn | sssssss | | | |
| | GCTGG | nnnnn | ssss | | | |
| 1287130 | TTCACTT | nnnnnnn | sosssss | 27062 | 27080 | 43 |
| | TCATAAT | nnnnnnn | sssssss | | | |
| | GCTGG | nnnnn | soss | | | |
| 1287131 | TTCACTT | nnnnnnn | sssssss | 27062 | 27080 | 43 |
| | TCATAAT | nnnnnnn | sosssss | | | |
| | GCTGG | nnnnn | ssss | | | |
| 1332263 | TTCACTT | nnnnnnn | sssssss | 27062 | 27080 | 43 |
| | TCATAAT | nnnnnnn | sosssss | | | |
| | GCTGG | nnnnn | soss | | | |
| 1332264 | TTCACTT | nnnnnnn | sssssss | 27062 | 27080 | 43 |
| | TCATAAT | nnnnnnn | sssssss | | | |
| | GCTGG | nnnnn | soss | | | |
| 1332266 | TTCACTT | nnnnnnn | sssssss | 27062 | 27080 | 43 |
| | TCATAAT | nnnnnnn | sssssso | | | |
| | GCTGG | nnnnn | soss | | | |
| 1332270 | TTCACTT | nnnnnnn | sssssss | 27062 | 27080 | 43 |
| | TCATAAT | nnnnnnn | sssssss | | | |
| | GCTGG | nnnnn | ooss | | | |
| 1287124 | ATTCACT | nnnnnnn | sssssss | 27062 | 27081 | 45 |
| | TTCATAA | nnnnnnn | sssssss | | | |
| | TGCTGG | nnnnnn | sssss | | | |
| 1287125 | ATTCACT | nnnnnnn | sosssss | 27062 | 27081 | 45 |
| | TTCATAA | nnnnnnn | sssssss | | | |
| | TGCTGG | nnnnnn | ssoss | | | |
| 1287126 | ATTCACT | nnnnnnn | sssssss | 27062 | 27081 | 45 |
| | TTCATAA | nnnnnnn | ssossss | | | |
| | TGCTGG | nnnnnn | sssss | | | |
| 1332267 | ATTCACT | nnnnnnn | sssssss | 27062 | 27081 | 45 |
| | TTCATAA | nnnnnnn | sssssss | | | |
| | TGCTGG | nnnnnn | ssoss | | | |
| 1332268 | ATTCACT | nnnnnnn | sssssss | 27062 | 27081 | 45 |
| | TTCATAA | nnnnnnn | sssssss | | | |
| | TGCTGG | nnnnnn | sooss | | | |
| 1332269 | ATTCACT | nnnnnnn | SSSSSSS | 27062 | 27081 | 45 |
| | TTCATAA | nnnnnnn | SSSSSSS | | | |
| | TGCTGG | nnnnnn | OSOSS | | | |
| 1332271 | ATTCACT | nnnnnnn | SSSSSSS | 27062 | 27081 | 45 |
| | TTCATAA | nnnnnnn | SSOSSSS | | | |
| | TGCTGG | nnnnnn | SSOSS | | | |
| 1287123 | TTCACTT | nnnnnnn | sssssss | 27061 | 27080 | 52 |
| | TCATAAT | nnnnnnn | sssssss | | | |
| | GCTGGC | nnnnnn | sssss | | | |

### Table 3

[0259] The modified oligonucleotides in Table 3 below are 18 or 19 nucleosides in length. Each nucleoside comprises either a 2′-MOE sugar moiety or a 2′-NMA sugar moiety. The sugar motif for each modified oligonucleotide is provided in the Sugar Motif column, wherein each ‘e’ represents a 2′-MOE sugar moiety, and each ‘n’ represents a 2′-NMA sugar moiety. Each internucleoside linkage is a phosphorothioate internucleoside linkage. The internucleoside linkage motif for each modified oligonucleotide is provided in the Internucleoside Linkage Motif column, wherein each ‘s’ represents a phosphorothioate internucleoside linkage. Each cytosine is a 5-methyl cytosine.

[0260] Each modified oligonucleotide listed in Table 3 below is 100% complementary to SEQ ID NO: 1 (GENBANK Accession No. NT_006713.14 truncated from nucleotides 19939708 to 19967777), unless specifically stated otherwise. Non-complementary nucleobases are specified in the Nucleobase Sequence column in [symbol] . “Start site” indicates the 5′-most nucleoside to which the modified oligonucleotide is complementary in the target nucleic acid sequence. “Stop site” indicates the 3′-most nucleoside to which the modified oligonucleotide is complementary in the target nucleic acid sequence.

TABLE 3
Mixed 2′-MOE/2′-NMA modified oligonucleotides
with PS internucleoside linkages

| | | | Inter- | | | |
|---|---|---|---|---|---|---|
| | | | nucleo- | SEQ | SEQ | |
| | Nucleo- | | side | ID | ID | |
| | base | Sugar | Linkage | No: | No: | |
| | Sequence | Motif | Motif | 1 | 1 | SEQ |
| Compound | (5′ to | (5′ to | (5′ to | Start | Stop | ID |
| Number | 3′) | 3′) | 3′) | Site | Site | No. |
| 1212931 | CACTTTC | nennnnn | sssssss | 27061 | 27078 | 38 |
| | ATAATGC | eneennn | sssssss | | | |
| | TGGC | nnnn | sss | | | |
| 1212936 | CACTTTC | nnnnnnn | sssssss | 27061 | 27078 | 38 |
| | ATAATGC | nnnnnen | sssssss | | | |
| | TGGC | neen | sss | | | |
| 1212941 | CACTTTC | nennnnn | sssssss | 27061 | 27078 | 38 |
| | ATAATGC | eneenen | sssssss | | | |
| | TGGC | neen | sss | | | |
| 1287728 | TCACTTT | nnnnnnn | sssssss | 27061 | 27079 | 39 |
| | CATAATG | nnnnnnn | sssssss | | | |
| | CTGGC | nnnne | ssss | | | |
| 1287729 | TCACTTT | nnnnnnn | sssssss | 27062 | 27079 | 50 |
| | CATAATG | nnnnnnn | sssssss | | | |
| | CTGG [symbol] | nnnne | ssss | | | |
| 1287730 | TCACTTT | nnnnnnn | sssssss | 27062 | 27079 | 51 |
| | CATAATG | nnnnnnn | sssssss | | | |
| | CTGG [symbol] | nnnne | ssss | | | |

### Table 4

[0261] The modified oligonucleotides in Table 4 below are 16, 17, or 18 nucleosides in length. Each nucleoside comprises either a 2′-MOE sugar moiety or a cEt sugar moiety. The sugar motif for each modified oligonucleotide is provided in the Sugar Motif column, wherein each ‘e’ represents a 2′-MOE sugar moiety, and each ‘k’ represents a cEt sugar moiety. Each internucleoside linkage is a phosphorothioate internucleoside linkage. The internucleoside linkage motif for each modified oligonucleotide is provided in the Internucleoside Linkage Motif column, wherein each ‘s’ represents a phosphorothioate internucleoside linkage. Each cytosine is a 5-methyl cytosine.

[0262] Each modified oligonucleotide listed in Table 4 below is 100% complementary to SEQ ID NO: 1 (GENBANK Accession No. NT_006713.14 truncated from nucleotides 19939708 to 19967777). “Start site” indicates the 5′-most nucleoside to which the modified oligonucleotide is complementary in the target nucleic acid sequence. “Stop site” indicates the 3′-most nucleoside to which the modified oligonucleotide is complementary in the target nucleic acid sequence.

TABLE 4
Mixed 2′-MOE/cEt modified oligonucleotides
with PS internucleoside linkages

| | | | Inter- | | | |
|---|---|---|---|---|---|---|
| | | | nucleo- | SEQ | SEQ | |
| | Nucleo- | | side | ID | ID | |
| | base | Sugar | Linkage | No: | No: | |
| | Sequence | Motif | Motif | 1 | 1 | SEQ |
| Compound | (5′ to | (5′ to | (5′ to | Start | Stop | ID |
| Number | 3′) | 3′) | 3′) | Site | Site | No. |
| 1212961 | CACTTTC | keekeek | sssssss | 27061 | 27078 | 38 |
| | ATAATGC | eekeeke | sssssss | | | |
| | TGGC | eeek | sss | | | |
| 1212962 | CACTTTC | keeekee | sssssss | 27061 | 27078 | 38 |
| | ATAATGC | ekeeeke | sssssss | | | |
| | TGGC | eeek | sss | | | |
| 1212963 | CACTTTC | keeeeek | sssssss | 27061 | 27078 | 38 |
| | ATAATGC | eeeeeke | sssssss | | | |
| | TGGC | eeek | sss | | | |
| 1212964 | CACTTTC | keeeeee | sssssss | 27061 | 27078 | 38 |
| | ATAATGC | ekeeeee | sssssss | | | |
| | TGGC | eeek | sss | | | |
| 1212965 | CACTTTC | keeeeee | sssssss | 27061 | 27078 | 38 |
| | ATAATGC | eeeeeee | sssssss | | | |
| | TGGC | eeek | sss | | | |
| 1212966 | CACTTTC | eeekeek | sssssss | 27061 | 27078 | 38 |
| | ATAATGC | eekeeke | sssssss | | | |
| | TGGC | ekek | sss | | | |
| 1212967 | CACTTTC | eeekeek | sssssss | 27061 | 27078 | 38 |
| | ATAATGC | eekeeke | sssssss | | | |
| | TGGC | ekee | sss | | | |
| 1212968 | CACTTTC | eeeeeek | sssssss | 27061 | 27078 | 38 |
| | ATAATGC | eekeeke | sssssss | | | |
| | TGGC | ekee | sss | | | |
| 1212969 | CACTTTC | eeeeeek | sssssss | 27061 | 27078 | 38 |
| | ATAATGC | eekeeke | sssssss | | | |
| | TGGC | eeee | sss | | | |
| 1212970 | CACTTTC | eeeeeek | sssssss | 27061 | 27078 | 38 |
| | ATAATGC | eeeeeke | sssssss | | | |
| | TGGC | eeee | sss | | | |
| 1212971 | CACTTTC | keekeek | sssssss | 27061 | 27078 | 38 |
| | ATAATGC | eekeeee | sssssss | | | |
| | TGGC | eeee | sss | | | |
| 1212972 | CACTTTC | eeeeeee | sssssss | 27061 | 27078 | 38 |
| | ATAATGC | ekeekee | sssssss | | | |
| | TGGC | keek | sss | | | |
| 1212973 | CACTTTC | keekeek | sssssss | 27061 | 27078 | 38 |
| | ATAATGC | eeeeeee | sssssss | | | |
| | TGGC | eeee | sss | | | |
| 1212974 | CACTTTC | eeeeeee | sssssss | 27061 | 27078 | 38 |
| | ATAATGC | eeeekee | sssssss | | | |
| | TGGC | keek | sss | | | |
| 1212975 | CACTTTC | keekeee | sssssss | 27061 | 27078 | 38 |
| | ATAATGC | eeeeeee | sssssss | | | |
| | TGGC | eeee | sss | | | |
| 1212976 | CACTTTC | eeeeeee | sssssss | 27061 | 27078 | 38 |
| | ATAATGC | eeeeeee | sssssss | | | |
| | TGGC | keek | sss | | | |
| 1212977 | ACTTTCA | keekeek | sssssss | 27061 | 27077 | 37 |
| | TAATGCT | eekeeke | sssssss | | | |
| | GGC | eek | ss | | | |
| 1212978 | ACTTTCA | keeekee | sssssss | 27061 | 27077 | 37 |
| | TAATGCT | ekeeeke | sssssss | | | |
| | GGC | eek | ss | | | |
| 1212979 | ACTTTCA | keeeeke | sssssss | 27061 | 27077 | 37 |
| | TAATGCT | eeeekee | sssssss | | | |
| | GGC | eek | ss | | | |
| 1212980 | ACTTTCA | keeeeee | sssssss | 27061 | 27077 | 37 |
| | TAATGCT | ekeeeee | sssssss | | | |
| | GGC | eek | ss | | | |
| 1212981 | ACTTTCA | keeeeee | sssssss | 27061 | 27077 | 37 |
| | TAATGCT | eeeeeee | sssssss | | | |
| | GGC | eek | ss | | | |
| 1212982 | ACTTTCA | eekeeke | sssssss | 27061 | 27077 | 37 |
| | TAATGCT | ekeekee | sssssss | | | |
| | GGC | kek | ss | | | |
| 1212983 | ACTTTCA | eekeeke | sssssss | 27061 | 27077 | 37 |
| | TAATGCT | ekeekee | sssssss | | | |
| | GGC | kee | ss | | | |
| 1212984 | ACTTTCA | eeeeeke | sssssss | 27061 | 27077 | 37 |
| | TAATGCT | ekeekee | sssssss | | | |
| | GGC | kee | ss | | | |
| 1212985 | ACTTTCA | eeeeeke | sssssss | 27061 | 27077 | 37 |
| | TAATGCT | ekeekee | sssssss | | | |
| | GGC | eee | ss | | | |
| 1212986 | ACTTTCA | eeeeeke | sssssss | 27061 | 27077 | 37 |
| | TAATGCT | eeeekee | sssssss | | | |
| | GGC | eee | ss | | | |
| 1212987 | ACTTTCA | keekeek | sssssss | 27061 | 27077 | 37 |
| | TAATGCT | eekeeee | sssssss | | | |
| | GGC | eee | ss | | | |
| 1212988 | ACTTTCA | eeeeeee | sssssss | 27061 | 27077 | 37 |
| | TAATGCT | keekeek | sssssss | | | |
| | GGC | eek | ss | | | |
| 1212989 | ACTTTCA | keekeek | sssssss | 27061 | 27077 | 37 |
| | TAATGCT | eeeeeee | sssssss | | | |
| | GGC | eee | ss | | | |
| 1212990 | ACTTTCA | eeeeeee | sssssss | 27061 | 27077 | 37 |
| | TAATGCT | eeekeek | sssssss | | | |
| | GGC | eek | ss | | | |
| 1212991 | ACTTTCA | keekeee | sssssss | 27061 | 27077 | 37 |
| | TAATGCT | eeeeeee | sssssss | | | |
| | GGC | eee | ss | | | |
| 1212992 | ACTTTCA | eeeeeee | sssssss | 27061 | 27077 | 37 |
| | TAATGCT | eeeeeek | sssssss | | | |
| | GGC | eek | ss | | | |
| 1212993 | CTTTCAT | keekeek | sssssss | 27061 | 27076 | 36 |
| | AATGCTG | eekeeke | sssssss | | | |
| | GC | ek | s | | | |
| 1212994 | CTTTCAT | keeekee | sssssss | 27061 | 27076 | 36 |
| | AATGCTG | ekeeeke | sssssss | | | |
| | GC | ek | s | | | |
| 1212995 | CTTTCAT | keeeeke | sssssss | 27061 | 27076 | 36 |
| | AATGCTG | eeekeee | sssssss | | | |
| | GC | ek | s | | | |
| 1212996 | CTTTCAT | keeeeee | sssssss | 27061 | 27076 | 36 |
| | AATGCTG | ekeeeee | sssssss | | | |
| | GC | ek | s | | | |
| 1212997 | CTTTCAT | keeeeee | sssssss | 27061 | 27076 | 36 |
| | AATGCTG | eeeeeee | sssssss | | | |
| | GC | ek | s | | | |
| 1212998 | CTTTCAT | kekeeke | sssssss | 27061 | 27076 | 36 |
| | AATGCTG | ekeekee | sssssss | | | |
| | GC | ke | s | | | |
| 1212999 | CTTTCAT | eekeeke | sssssss | 27061 | 27076 | 36 |
| | AATGCTG | ekeekee | sssssss | | | |
| | GC | ke | s | | | |
| 1213000 | CTTTCAT | eeeeeke | sssssss | 27061 | 27076 | 36 |
| | AATGCTG | ekeekee | sssssss | | | |
| | GC | ke | s | | | |
| 1213001 | CTTTCAT | eeeeeke | sssssss | 27061 | 27076 | 36 |
| | AATGCTG | ekeekee | sssssss | | | |
| | GC | ee | s | | | |
| 1213002 | CTTTCAT | eeeeeke | sssssss | 27061 | 27076 | 36 |
| | AATGCTG | eeeekee | sssssss | | | |
| | GC | ee | s | | | |
| 1213003 | CTTTCAT | keekeek | sssssss | 27061 | 27076 | 36 |
| | AATGCTG | eekeeee | sssssss | | | |
| | GC | ee | s | | | |
| 1213004 | CTTTCAT | eeeeeek | sssssss | 27061 | 27076 | 36 |
| | AATGCTG | eekeeke | sssssss | | | |
| | GC | ek | s | | | |
| 1213005 | CTTTCAT | keekeek | sssssss | 27061 | 27076 | 36 |
| | AATGCTG | eeeeeee | sssssss | | | |
| | GC | ee | s | | | |
| 1213006 | CTTTCAT | eeeeeee | sssssss | 27061 | 27076 | 36 |
| | AATGCTG | eekeeke | sssssss | | | |
| | GC | ek | s | | | |
| 1213007 | CTTTCAT | keekeee | sssssss | 27061 | 27076 | 36 |
| | AATGCTG | eeeeeee | sssssss | | | |
| | GC | ee | s | | | |
| 1213008 | CTTTCAT | eeeeeee | sssssss | 27061 | 27076 | 36 |
| | AATGCTG | eeeeeke | sssssss | | | |
| | GC | ek | s | | | |

### Table 5

[0263] The modified oligonucleotides in Table 5 below are 19 or 20 nucleosides in length. Each nucleoside comprises a 2′-MOE sugar moiety, a 2′-NMA sugar moiety, a 2′-OMe sugar moiety, or a 2′-β-D-deoxyribosyl sugar moiety. The sugar motif for each modified oligonucleotide is provided in the Sugar Motif column, wherein each ‘e’ represents a 2′-MOE sugar moiety, each ‘n’ represents a 2′-NMA sugar moiety, each ‘y’ represents a 2′-OMe sugar moiety, and each ‘d’ represents a 2′-β-D-deoxyribosyl sugar moiety. Each internucleoside linkage is either a phosphorothioate internucleoside linkage or a phosphodiester internucleoside linkage. The internucleoside linkage motif for each modified oligonucleotide, provided in the Internucleoside Linkage Motif column, is (from 5′ to 3′): ssssssssssssssssso; wherein each ‘s’ represents a phosphorothioate internucleoside linkage, and each ‘o’ represents a phosphodiester internucleoside linkage. Cytosines are either non-methylated cytosines or 5-methyl cytosines, wherein each lowercase ‘c’ in the Nucleobase Sequence column represents a non-methylated cytosine, and each uppercase ‘C’ in the Nucleobase Sequence column represents a 5-methyl cytosine.

[0264] Each nucleobase in the modified oligonucleotides listed in Table 5 below is complementary to SEQ ID NO: 1 (GENBANK Accession No. NT_006713.14 truncated from nucleotides 19939708 to 19967777), unless specifically stated otherwise. Non-complementary nucleobases are specified in the Nucleobase Sequence column in underlined, bold, italicized font “Start site” indicates the 5′-most nucleoside to which the modified oligonucleotide is complementary in the target nucleic acid sequence. “Stop site” indicates the 3′-most nucleoside to which the modified oligonucleotide is complementary in the target nucleic acid sequence.

TABLE 5
Modified oligonucleotides with mixed
PS/PO internucleoside linkages

| | | | Inter- | | | |
|---|---|---|---|---|---|---|
| | | | nucleo- | SEQ | SEQ | |
| | Nucleo- | | side | ID | ID | |
| | base | Sugar | Linkage | No: | No: | |
| | Sequence | Motif | Motif | 1 | 1 | SEQ |
| Compound | (5′ to | (5′ to | (5′ to | Start | Stop | ID |
| Number | 3′) | 3′) | 3′) | Site | Site | No. |
| 1287707 | TCACTTT | eeeeeee | sssssss | 27061 | 27079 | 39 |
| | CATAATG | eeeeeee | sssssss | | | |
| | CTGGC | eeeed | ssso | | | |
| 1287708 | TCACTTT | eeeeeee | sssssss | 27061 | 27079 | 39 |
| | CATAATG | eeeeeee | sssssss | | | |
| | CTGGc | eeeed | ssso | | | |
| 1287709 | TCACTTT | eeeeeee | sssssss | 27062 | 27079 | 50 |
| | CATAATG | eeeeeee | sssssss | | | |
| | CTGG [symbol] | eeeed | ssso | | | |
| 1287710 | TCACTTT | eeeeeee | sssssss | 27062 | 27079 | 51 |
| | CATAATG | eeeeeee | sssssss | | | |
| | CTGG [symbol] | eeeed | ssso | | | |
| 1287711 | TCACTTT | eeeeeee | sssssss | 27061 | 27079 | 39 |
| | CATAATG | eeeeeee | sssssss | | | |
| | CTGGc | eeeey | ssso | | | |
| 1287712 | TCACTTT | eeeeeee | sssssss | 27062 | 27079 | 53 |
| | CATAATG | eeeeeee | sssssss | | | |
| | CTGG [symbol] | eeeey | ssso | | | |
| 1287713 | TCACTTT | eeeeeee | sssssss | 27062 | 27079 | 51 |
| | CATAATG | eeeeeee | sssssss | | | |
| | CTGG [symbol] | eeeey | ssso | | | |
| 1287731 | TCACTTT | nnnnnnn | sssssss | 27061 | 27079 | 39 |
| | CATAATG | nnnnnnn | sssssss | | | |
| | CTGGC | nnnne | ssso | | | |
| 1287732 | TCACTTT | nnnnnnn | sssssss | 27061 | 27079 | 39 |
| | CATAATG | nnnnnnn | sssssss | | | |
| | CTGGc | nnnne | ssso | | | |
| 1287733 | TCACTTT | nnnnnnn | sssssss | 27062 | 27079 | 50 |
| | CATAATG | nnnnnnn | sssssss | | | |
| | CTGG [symbol] | nnnne | ssso | | | |
| 1287734 | TCACTTT | nnnnnnn | sssssss | 27062 | 27079 | 51 |
| | CATAATG | nnnnnnn | sssssss | | | |
| | CTGG [symbol] | nnnne | ssso | | | |
| 1287735 | TCACTTT | nnnnnnn | sssssss | 27061 | 27079 | 39 |
| | CATAATG | nnnnnnn | sssssss | | | |
| | CTGGC | nnnnd | ssso | | | |
| 1287736 | TCACTTT | nnnnnnn | sssssss | 27061 | 27079 | 39 |
| | CATAATG | nnnnnnn | sssssss | | | |
| | CTGGc | nnnnd | ssso | | | |
| 1287737 | TCACTTT | nnnnnnn | sssssss | 27062 | 27079 | 50 |
| | CATAATG | nnnnnnn | sssssss | | | |
| | CTGG [symbol] | nnnnd | ssso | | | |
| 1287738 | TCACTTT | nnnnnnn | sssssss | 27062 | 27079 | 51 |
| | CATAATG | nnnnnnn | sssssss | | | |
| | CTGG [symbol] | nnnnd | ssso | | | |
| 1287739 | TCACTTT | nnnnnnn | sssssss | 27061 | 27079 | 39 |
| | CATAATG | nnnnnnn | sssssss | | | |
| | CTGGc | nnnny | ssso | | | |
| 1287740 | TCACTTT | nnnnnnn | sssssss | 27062 | 27079 | 53 |
| | CATAATG | nnnnnnn | sssssss | | | |
| | CTGG [symbol] | nnnny | ssso | | | |
| 1287741 | TCACTTT | nnnnnnn | sssssss | 27062 | 27079 | 51 |
| | CATAATG | nnnnnnn | sssssss | | | |
| | CTGG [symbol] | nnnny | ssso | | | |
| 1287705 | TCACTTT | eeeeeee | sssssss | 27062 | 27079 | 50 |
| | CATAATG | eeeeeee | sssssss | | | |
| | CTGG [symbol] | eeeee | ssso | | | |
| 1287706 | TCACTTT | eeeeeee | sssssss | 27062 | 27079 | 51 |
| | CATAATG | eeeeeee | sssssss | | | |
| | CTGG [symbol] | eeeee | ssso | | | |
| 1287704 | TCACTTT | eeeeeee | sssssss | 27061 | 27079 | 39 |
| | CATAATG | eeeeeee | sssssss | | | |
| | CTGGc | eeeee | ssso | | | |
| 1287703 | TCACTTT | eeeeeee | sssssss | 27061 | 27079 | 39 |
| | CATAATG | eeeeeee | sssssss | | | |
| | CTGGC | eeeee | ssso | | | |

### Table 6

[0265] The modified oligonucleotides in Table 6 below are 19 or 20 nucleosides in length. Each nucleoside comprises a 2′-MOE sugar moiety, a 2′-NMA sugar moiety, or a 2′-β-D-deoxyribosyl sugar moiety. The sugar motif for each modified oligonucleotide is provided in the Sugar Motif column, wherein each ‘e’ represents a 2′-MOE sugar moiety, each ‘n’ represents a 2′-NMA sugar moiety, and each ‘d’ represents a 2′-β-D-deoxyribosyl sugar moiety. Each internucleoside linkage is either a phosphorothioate internucleoside linkage or a phosphodiester internucleoside linkage. The internucleoside linkage motif for each modified oligonucleotide, provided in the Internucleoside Linkage Motif column, is (from 5′ to 3′): sssssssssssssssssoo; wherein each ‘s’ represents a phosphorothioate internucleoside linkage, and each ‘o’ represents a phosphodiester internucleoside linkage. Each cytosine is a 5-methyl cytosine.

[0266] Each nucleobase in the modified oligonucleotide listed in Table 6 below is complementary to SEQ ID NO: 1 (GENBANK Accession No. NT_006713.14 truncated from nucleotides 19939708 to 19967777), unless specifically stated otherwise. Non-complementary nucleobases are specified in the Nucleobase Sequence column in [symbol] [symbol] “Start site” indicates the 5′-most nucleoside to which the modified oligonucleotide is complementary in the target nucleic acid sequence. “Stop site” indicates the 3′-most nucleoside to which the modified oligonucleotide is complementary in the target nucleic acid sequence.

TABLE 6
Modified oligonucleotides with mixed
PS/PO internucleoside linkages

| | | | | | | |
|---|---|---|---|---|---|---|
| | | | Inter- | | | |
| | | | nucleo- | SEQ | SEQ | |
| | Nucleo- | | side | ID | ID | |
| | base | Sugar | Linkage | No: | No: | |
| | Sequence | Motif | Motif | 1 | 1 | SEQ |
| Compound | (5′ to | (5′ to | (5′ to | Start | Stop | ID |
| Number | 3′) | 3′) | 3′) | Site | Site | No. |
| 1318749 | TCACTTT | nnnnnnn | sssssss | 27062 | 27079 | 54 |
| | CATAATG | nnnnnnn | sssssss | | | |
| | CTGG [symbol] A | nnnndd | sssoo | | | |
| 1318750 | TCACTTT | nnnnnnn | sssssss | 27060 | 27079 | 35 |
| | CATAATG | nnnnnnn | sssssss | | | |
| | CTGGCA | nnnned | sssoo | | | |
| 1318751 | TCACTTT | nnnnnnn | sssssss | 27060 | 27079 | 35 |
| | CATAATG | nnnnnnn | sssssss | | | |
| | CTGGCA | nnnndd | sssoo | | | |
| 1318752 | TCACTTT | nnnnnnn | sssssss | 27062 | 27079 | 54 |
| | CATAATG | nnnnnnn | sssssss | | | |
| | CTGG [symbol] A | nnnned | sssoo | | | |
| 1318753 | TCACTTT | nnnnnnn | sssssss | 27062 | 27079 | 54 |
| | CATAATG | nnnnnnn | sssssss | | | |
| | CTGG [symbol] A | nnnnde | sssoo | | | |
| 1318754 | TCACTTT | nnnnnnn | sssssss | 27060 | 27079 | 35 |
| | CATAATG | nnnnnnn | sssssss | | | |
| | CTGGCA | nnnnde | sssoo | | | |
| 1318755 | TCACTTT | nnnnnnn | sssssss | 27062 | 27079 | 54 |
| | CATAATG | nnnnnnn | sssssss | | | |
| | CTGG [symbol] A | nnnnee | sssoo | | | |
| 1318756 | TCACTTT | nnnnnnn | sssssss | 27060 | 27079 | 35 |
| | CATAATG | nnnnnnn | sssssss | | | |
| | CTGGCA | nnnnee | sssoo | | | |
| 1318757 | TCACTTT | eeeeeee | sssssss | 27062 | 27079 | 55 |
| | CATAATG | eeeeeee | sssssss | | | |
| | CTGGA [symbol] | eeeedd | sssoo | | | |
| 1318758 | TCACTTT | eeeeeee | sssssss | 27062 | 27079 | 56 |
| | CATAATG | eeeeeee | sssssss | | | |
| | CTGG [symbol] | eeeedd | sssoo | | | |
| 1318759 | TCACTTT | eeeeeee | sssssss | 27062 | 27079 | 57 |
| | CATAATG | eeeeeee | sssssss | | | |
| | CTGG [symbol] | eeeedd | sssoo | | | |
| 1318760 | TCACTTT | eeeeeee | sssssss | 27062 | 27079 | 54 |
| | CATAATG | eeeeeee | sssssss | | | |
| | CTGG [symbol] A | eeeedd | sssoo | | | |
| 1318761 | TCACTTT | eeeeeee | sssssss | 27062 | 27079 | 58 |
| | CATAATG | eeeeeee | sssssss | | | |
| | CTGG [symbol] | eeeedd | sssoo | | | |
| 1318762 | TCACTTT | eeeeeee | sssssss | 27062 | 27079 | 59 |
| | CATAATG | eeeeeee | sssssss | | | |
| | CTGG [symbol] A | eeeedd | sssoo | | | |
| 1318763 | TCACTTT | eeeeeee | sssssss | 27061 | 27079 | 60 |
| | CATAATG | eeeeeee | sssssss | | | |
| | CTGGC [symbol] | eeeedd | sssoo | | | |
| 1318764 | TCACTTT | eeeeeee | sssssss | 27062 | 27079 | 54 |
| | CATAATG | eeeeeee | sssssss | | | |
| | CTGG [symbol] A | eeeeed | sssoo | | | |
| 1318765 | TCACTTT | eeeeeee | sssssss | 27062 | 27079 | 56 |
| | CATAATG | eeeeeee | sssssss | | | |
| | CTGGAC | eeeede | sssoo | | | |
| 1318766 | TCACTTT | eeeeeee | sssssss | 27061 | 27079 | 61 |
| | CATAATG | eeeeeee | sssssss | | | |
| | CTGGC [symbol] | eeeedd | sssoo | | | |
| 1318767 | TCACTTT | eeeeeee | sssssss | 27062 | 27079 | 58 |
| | CATAATG | eeeeeee | sssssss | | | |
| | CTGGA [symbol] | eeeede | sssoo | | | |
| 1318768 | TCACTTT | eeeeeee | sssssss | 27060 | 27079 | 35 |
| | CATAATG | eeeeeee | sssssss | | | |
| | CTGGCA | eeeedd | sssoo | | | |
| 1318769 | TCACTTT | eeeeeee | sssssss | 27060 | 27079 | 35 |
| | CATAATG | eeeeeee | sssssss | | | |
| | CTGGCA | eeeeed | sssoo | | | |
| 1318770 | TCACTTT | eeeeeee | sssssss | 27062 | 27079 | 55 |
| | CATAATG | eeeeeee | sssssss | | | |
| | CTGG [symbol] | eeeede | sssoo | | | |
| 1318771 | TCACTTT | eeeeeee | sssssss | 27062 | 27079 | 59 |
| | CATAATG | eeeeeee | sssssss | | | |
| | CTGG [symbol] A | eeeede | sssoo | | | |
| 1318772 | TCACTTT | eeeeeee | sssssss | 27062 | 27079 | 54 |
| | CATAATG | eeeeeee | sssssss | | | |
| | CTGG [symbol] A | eeeede | sssoo | | | |
| 1318773 | TCACTTT | eeeeeee | sssssss | 27062 | 27079 | 57 |
| | CATAATG | eeeeeee | sssssss | | | |
| | CTGG [symbol] | eeeede | sssoo | | | |
| 1318774 | TCACTTT | eeeeeee | sssssss | 27061 | 27079 | 60 |
| | CATAATG | eeeeeee | sssssss | | | |
| | CTGGC [symbol] | eeeede | sssoo | | | |
| 1318775 | TCACTTT | eeeeeee | sssssss | 27061 | 27079 | 61 |
| | CATAATG | eeeeeee | sssssss | | | |
| | CTGGC [symbol] | eeeede | sssoo | | | |
| 1318776 | TCACTTT | eeeeeee | sssssss | 27060 | 27079 | 35 |
| | CATAATG | eeeeeee | sssssss | | | |
| | CTGGCA | eeeede | sssoo | | | |
| 1333508 | TCACTTT | nnnnnnn | sssssss | 27061 | 27079 | 61 |
| | CATAATG | nnnnnnn | sssssss | | | |
| | CTGGC [symbol] | nnnnee | sssoo | | | |
| 1318777 | TCACTTT | eeeeeee | sssssss | 27062 | 27079 | 56 |
| | CATAATG | eeeeeee | sssssss | | | |
| | CTGG [symbol] | eeeeee | sssoo | | | |
| 1318778 | TCACTTT | eeeeeee | sssssss | 27062 | 27079 | 58 |
| | CATAATG | eeeeeee | sssssss | | | |
| | CTGG [symbol] | eeeeee | sssoo | | | |
| 1318779 | TCACTTT | eeeeeee | sssssss | 27062 | 27079 | 54 |
| | CATAATG | eeeeeee | sssssss | | | |
| | CTGG [symbol] A | eeeeee | sssoo | | | |
| 1318780 | TCACTTT | eeeeeee | sssssss | 27062 | 27079 | 57 |
| | CATAATG | eeeeeee | sssssss | | | |
| | CTGG [symbol] | eeeeee | sssoo | | | |
| 1318781 | TCACTTT | eeeeeee | sssssss | 27062 | 27079 | 55 |
| | CATAATG | eeeeeee | sssssss | | | |
| | CTGG [symbol] | eeeeee | sssoo | | | |
| 1318782 | TCACTTT | eeeeeee | sssssss | 27061 | 27079 | 61 |
| | CATAATG | eeeeeee | sssssss | | | |
| | CTGGC [symbol] | eeeeee | sssoo | | | |
| 1318783 | TCACTTT | eeeeeee | sssssss | 27062 | 27079 | 59 |
| | CATAATG | eeeeeee | sssssss | | | |
| | CTGG [symbol] A | eeeeee | sssoo | | | |
| 1318784 | TCACTTT | eeeeeee | sssssss | 27061 | 27079 | 60 |
| | CATAATG | eeeeeee | sssssss | | | |
| | CTGGC [symbol] | eeeeee | sssoo | | | |
| 1318748 | TCACTTT | eeeeeee | sssssss | 27060 | 27079 | 35 |
| | CATAATG | eeeeeee | sssssss | | | |
| | CTGGCA | eeeeee | sssoo | | | |

### Table 7

[0267] The modified oligonucleotides in Table 7 below are each 19 nucleosides in length. Each nucleoside comprises a 2′-MOE sugar moiety, a 2′-NMA sugar moiety, or a 2′-β-D-deoxyribosyl sugar moiety. The sugar motif for each modified oligonucleotide is provided in the Sugar Motif column, wherein each ‘e’ represents a 2′-MOE sugar moiety, each ‘n’ represents a 2′-NMA sugar moiety, and each ‘d’ represents a 2′β-D-deoxyribosyl sugar moiety. Each internucleoside linkage is either a phosphorothioate internucleoside linkage or a phosphodiester internucleoside linkage. The internucleoside linkage motif for each modified oligonucleotide, provided in the Internucleoside Linkage Motif column, is (from 5′ to 3′): ssssssssssssososso; wherein each ‘s’ represents a phosphorothioate internucleoside linkage, and each ‘o’ represents a phosphodiester internucleoside linkage. Each cytosine is a 5-methyl cytosine.

[0268] Each nucleobase in the modified oligonucleotide listed in Table 7 below is complementary to SEQ ID NO: 1 (GENBANK Accession No. NT_006713.14 truncated from nucleotides 19939708 to 19967777), unless specifically stated otherwise. Non-complementary nucleobases are specified in the Nucleobase Sequence column in, [symbol] underlined, [symbol] “Start site” indicates the 5′-most nucleoside to which the modified oligonucleotide is complementary in the target nucleic acid sequence. “Stop site” indicates the 3′-most nucleoside to which the modified oligonucleotide is complementary in the target nucleic acid sequence.

TABLE 7
Modified oligonucleotides with mixed
PS/PO internucleoside linkages

| | | | Inter- | | | |
|---|---|---|---|---|---|---|
| | Nucleo- | | nucleo- | SEQ | SEQ | |
| | base | | side | ID | ID | |
| | Se- | Sugar | Linkage | No: | No: | |
| | quence | Motif | Motif | 1 | 1 | SEQ |
| Compound | (5′ to | (5′ to | (5′ to | Start | Stop | ID |
| Number | 3′) | 3′) | 3′) | Site | Site | No. |
| 1332247 | TCACTTT | nnnnnnn | sssssss | 27061 | 27079 | 39 |
| | CATAATG | nnnnnnn | sssssos | | | |
| | CTGGC | nnnnd | osso | | | |
| 1332248 | TCACTTT | nnnnnnn | sssssss | 27062 | 27079 | 51 |
| | CATAATG | nnnnnnn | sssssos | | | |
| | CTGG [symbol] | nnnnd | osso | | | |
| 1332249 | TCACTTT | nnnnnnn | sssssss | 27062 | 27079 | 51 |
| | CATAATG | nnnnnnn | sssssos | | | |
| | CTGG [symbol] | nnnne | osso | | | |
| 1332251 | TCACTTT | nnnnnnn | sssssss | 27061 | 27079 | 39 |
| | CATAATG | nnnnnnn | sssssos | | | |
| | CTGGC | nnnne | osso | | | |
| 1332255 | TCACTTT | eeeeeee | sssssss | 27061 | 27079 | 39 |
| | CATAATG | eeeeeee | sssssos | | | |
| | CTGGC | eeeed | osso | | | |
| 1332257 | TCACTTT | eeeeeee | sssssss | 27062 | 27079 | 51 |
| | CATAATG | eeeeeee | sssssos | | | |
| | CTGG [symbol] | eeeed | osso | | | |
| 1332256 | TCACTTT | eeeeeee | sssssss | 27062 | 27079 | 51 |
| | CATAATG | eeeeeee | sssssos | | | |
| | CTGG [symbol] | eeeee | osso | | | |
| 1332258 | TCACTTT | eeeeeee | sssssss | 27061 | 27079 | 39 |
| | CATAATG | eeeeeee | sssssos | | | |
| | CTGGC | eeeee | osso | | | |

### Table 8

[0269] The modified oligonucleotides in Table 8 below are each 19 nucleosides in length. Each nucleoside comprises a 2′-MOE sugar moiety, a 2′-NMA sugar moiety, or a 2′-β-D-deoxyribosyl sugar moiety. The sugar motif for each modified oligonucleotide is provided in the Sugar Motif column, wherein each ‘e’ represents a 2′-MOE sugar moiety, each ‘n’ represents a 2′-NMA sugar moiety, and each ‘d’ represents a 2′-β-D-deoxyribosyl sugar moiety. Each internucleoside linkage is either a phosphorothioate internucleoside linkage or a phosphodiester internucleoside linkage. The internucleoside linkage motif for each modified oligonucleotide, provided in the Internucleoside Linkage Motif column, is (from 5′ to 3′): ssssssssssssssosso; wherein each ‘s’ represents a phosphorothioate internucleoside linkage, and each ‘o’ represents a phosphodiester internucleoside linkage. Each cytosine is a 5-methyl cytosine.

[0270] Each nucleobase in the modified oligonucleotide listed in Table 8 below is complementary to SEQ ID NO: 1 (GENBANK Accession No. NT_006713.14 truncated from nucleotides 19939708 to 19967777), unless specifically stated otherwise. Non-complementary nucleobases are specified in the Nucleobase Sequence column in [symbol] [symbol] “Start site” indicates the 5′-most nucleoside to which the modified oligonucleotide is complementary in the target nucleic acid sequence. “Stop site” indicates the 3′-most nucleoside to which the modified oligonucleotide is complementary in the target nucleic acid sequence.

TABLE 8
Modified oligonucleotides with mixed
PS/PO internucleoside linkages

| | | | Inter- | | | |
|---|---|---|---|---|---|---|
| | Nucleo- | | nucleo- | SEQ | SEQ | |
| | base | | side | ID | ID | |
| | Se- | Sugar | Linkage | No: | No: | |
| | quence | Motif | Motif | 1 | 1 | SEQ |
| Compound | (5′ to | (5′ to | (5′ to | Start | Stop | ID |
| Number | 3′) | 3′) | 3′) | Site | Site | No. |
| 1332250 | TCACTTT | nnnnnnn | sssssss | 27062 | 27079 | 51 |
| | CATAATG | nnnnnnn | sssssss | | | |
| | CTGG [symbol] | nnnnd | osso | | | |
| 1332252 | TCACTTT | nnnnnnn | sssssss | 27061 | 27079 | 39 |
| | CATAATG | nnnnnnn | sssssss | | | |
| | CTGGC | nnnnd | osso | | | |
| 1332253 | TCACTTT | nnnnnnn | sssssss | 27062 | 27079 | 51 |
| | CATAATG | nnnnnnn | sssssss | | | |
| | CTGG [symbol] | nnnne | osso | | | |
| 1332254 | TCACTTT | nnnnnnn | sssssss | 27061 | 27079 | 39 |
| | CATAATG | nnnnnnn | sssssss | | | |
| | CTGGC | nnnne | osso | | | |
| 1332259 | TCACTTT | eeeeeee | sssssss | 27062 | 27079 | 51 |
| | CATAATG | eeeeeee | sssssss | | | |
| | CTGG [symbol] | eeeed | osso | | | |
| 1332260 | TCACTTT | eeeeeee | sssssss | 27061 | 27079 | 39 |
| | CATAATG | eeeeeee | sssssss | | | |
| | CTGGC | eeeed | osso | | | |
| 1332261 | TCACTTT | eeeeeee | sssssss | 27062 | 27079 | 51 |
| | CATAATG | eeeeeee | sssssss | | | |
| | CTGG [symbol] | eeeee | osso | | | |
| 1332262 | TCACTTT | eeeeeee | sssssss | 27061 | 27079 | 39 |
| | CATAATG | eeeeeee | sssssss | | | |
| | CTGGC | eeeee | osso | | | |

### Table 9

[0271] The modified oligonucleotides in Table 9 below are each 19 nucleosides in length. Each nucleoside comprises a 2′-MOE sugar moiety or a 2′-NMA sugar moiety. The sugar motif for each modified oligonucleotide is provided in the Sugar Motif column, wherein each ‘e’ represents a 2′-MOE sugar moiety, and each ‘n’ represents a 2′-NMA sugar moiety. Each internucleoside linkage is either a phosphorothioate internucleoside linkage or a phosphodiester internucleoside linkage. The internucleoside linkage motif for each modified oligonucleotide, provided in the Internucleoside Linkage Motif column, is (from 5′ to 3′): osssssssssssssssss; wherein each ‘s’ represents a phosphorothioate internucleoside linkage, and each ‘o’ represents a phosphodiester internucleoside linkage. Each cytosine is a 5-methyl cytosine.

[0272] Each nucleobase in the modified oligonucleotide listed in Table 9 below is complementary to SEQ ID NO: 1 (GENBANK Accession No. NT_006713.14 truncated from nucleotides 19939708 to 19967777), unless specifically stated otherwise. Non-complementary nucleobases are specified in the Nucleobase Sequence column in [symbol] [symbol] “Start site” indicates the 5′-most nucleoside to which the modified oligonucleotide is complementary in the target nucleic acid sequence. “Stop site” indicates the 3′-most nucleoside to which the modified oligonucleotide is complementary in the target nucleic acid sequence.

TABLE 9
Modified oligonucleotides with mixed
PS/PO internucleoside linkages

| | | | Inter- | | | |
|---|---|---|---|---|---|---|
| | Nucleo- | | nucleo- | SEQ | SEQ | |
| | base | | side | ID | ID | |
| | Se- | Sugar | Linkage | No: | No: | |
| | quence | Motif | Motif | 1 | 1 | SEQ |
| Compound | (5′ to | (5′ to | (5′ to | Start | Stop | ID |
| Number | 3′) | 3′) | 3′) | Site | Site | No. |
| 1287742 | [symbol] TCACTT | ennnnnn | ossssss | 27062 | 27079 | 62 |
| | TCATAAT | nnnnnnn | sssssss | | | |
| | GCTGG | nnnnn | ssss | | | |
| 1287743 | TTCACTT | ennnnnn | ossssss | 27062 | 27080 | 43 |
| | TCATAAT | nnnnnnn | sssssss | | | |
| | GCTGG | nnnnn | ssss | | | |
| 1287744 | [symbol] TCACTT | ennnnnn | ossssss | 27062 | 27079 | 63 |
| | TCATAAT | nnnnnnn | sssssss | | | |
| | GCTGG | nnnnn | ssss | | | |
| 1287714 | [symbol] TCACTT | eeeeeee | ossssss | 27062 | 27079 | 62 |
| | TCATAAT | eeeeeee | sssssss | | | |
| | GCTGG | eeeee | ssss | | | |
| 1287716 | [symbol] TCACTT | eeeeeee | ossssss | 27062 | 27079 | 63 |
| | TCATAAT | eeeeeee | sssssss | | | |
| | GCTGG | eeeee | ssss | | | |
| 1287715 | TTCACTT | eeeeeee | ossssss | 27062 | 27080 | 43 |
| | TCATAAT | eeeeeee | sssssss | | | |
| | GCTGG | eeeee | ssss | | | |

### Table 10

[0273] The modified oligonucleotides in Table 10 below are each 20 nucleosides in length. Each nucleoside comprises a 2′-MOE sugar moiety or a 2′-NMA sugar moiety. The sugar motif for each modified oligonucleotide is provided in the Sugar Motif column, wherein each ‘e’ represents a 2′-MOE sugar moiety, and each ‘n’ represents a 2′-NMA sugar moiety. Each internucleoside linkage is either a phosphorothioate internucleoside linkage or a phosphodiester internucleoside linkage. The internucleoside linkage motif for each modified oligonucleotide, provided in the Internucleoside Linkage Motif column, is (from 5′ to 3′): ossssssssssssssssso; wherein each ‘s’ represents a phosphorothioate internucleoside linkage, and each ‘o’ represents a phosphodiester internucleoside linkage. Each cytosine is a 5-methyl cytosine.

[0274] Each modified oligonucleotide listed in Table 10 below is 100% complementary to SEQ ID NO: 1 (GENBANK Accession No. NT_006713.14 truncated from nucleotides 19939708 to 19967777). “Start site” indicates the 5′-most nucleoside to which the modified oligonucleotide is complementary in the target nucleic acid sequence. “Stop site” indicates the 3′-most nucleoside to which the modified oligonucleotide is complementary in the target nucleic acid sequence.

TABLE 10
Modified oligonucleotides with mixed
PS/PO internucleoside linkages

| | | | Inter- | | | |
|---|---|---|---|---|---|---|
| | Nucleo- | | nucleo- | SEQ | SEQ | |
| | base | | side | ID | ID | |
| | Se- | Sugar | Linkage | No: | No: | |
| | quence | Motif | Motif | 1 | 1 | SEQ |
| Compound | (5′ to | (5′ to | (5′ to | Start | Stop | ID |
| Number | 3′) | 3′) | 3′) | Site | Site | No. |
| 1287745 | TTCACTT | ennnnnn | ossssss | 27061 | 27080 | 52 |
| | TCATAAT | nnnnnnn | sssssss | | | |
| | GCTGGC | nnnnne | sssso | | | |
| 1287717 | TTCACTT | eeeeeee | ossssss | 27061 | 27080 | 52 |
| | TCATAAT | eeeeeee | sssssss | | | |
| | GCTGGC | eeeeee | sssso | | | |

### Example 2: Activity of Modified Oligonucleotides Complementary to Human SMN2 in Transgenic Mice, Single Dose (35 μg)

[0275] Activity of selected modified oligonucleotides described above was tested in human SMN2 transgenic mice. Taiwan strain of SMA type III mice were obtained from The Jackson Laboratory (Bar Harbor, Me.). These mice lack mouse SMN and are homozygous for human SMN2 (mSMN−/−; hSMN2+/+; FVB.Cg-Tg(SMN2)2HungSMN1tm1Hung/J, stock number 005058; Bar Harbor, Me.), or are heterozygous for human SMN2 (Tg(SMN2)2Hung FVB.Cg-Smn1tm1Hung Tg(SMN2)2Hung/J (stock #00005058) bred to FVB/NJ (Stock #001800)).

### Treatment

[0276] Homozygous or heterozygous transgenic mice were divided into groups of 4 mice each. Each mouse received a single ICV bolus of 35 μg of modified oligonucleotide. Comparator Compound Nos. 387954, 396442, and 396443 were also tested in this assay. A group of 4 mice received PBS as a negative control.

### RNA Analysis

[0277] Two weeks post treatment, mice were sacrificed and RNA was extracted from cortical brain tissue and spinal cord for real-time qPCR analysis of SMN2 RNA expression. Primer probe set hSMN2vd#4_LTS00216_MGB (forward sequence: GCTGATGCTTTGGGAAGTATGTTA (SEQ ID NO: 11); reverse sequence CACCTTCCTTCTTTTTGATTTTGTC, designated herein as SEQ ID NO: 12; probe sequence TACATGAGTGGCTATCATACT (SEQ ID NO: 13)) was used to determine the amount of SMN2 RNA including exon 7 (exon 7+). Primer probe set hSMN2_Sumner68_PPS50481 (forward sequence: CATGGTACATGAGTGGCTATCATACTG (SEQ ID NO: 14); reverse sequence: TGGTGTCATTTAGTGCTGCTCTATG (SEQ ID NO: 15); probe sequence CCAGCATTTCCATATAATAGC (SEQ TD NO: 16) was used to determine the amount of SMN2 RNA excluding exon 7 (exon 7⁻). Total SMN2 RNA levels were measured using primer probe set hSMN2_LTS00935 (forward sequence: CAGGAGGATTCCGTGCTGTT (SEQ TD NO: 17); reverse sequence CAGTGCTGTATCATCCCAAATGTC, (SEQ TD NO: 18); probe sequence: ACAGGCCAGAGCGAT (SEQ ID NO: 19)).

[0278] Results are presented as fold change in RNA levels relative to PBS control, normalized to total SMN2 levels. Each of Tables 11-17 represents a different experiment.

TABLE 11
Effect of modified oligonucleotides on human SMN2
RNA splicing in homozygous transgenic mice

| Compound | Dose | CORTEX | | SPINAL CORD | |
|---|---|---|---|---|---|
| No. | (μg) | exon 7⁺ | exon 7⁻ | exon 7⁺ | exon 7⁻ |
| PBS | — | 1 | 1 | 1 | 1 |
| 396442 | 35 | 3.3 | 0.3 | 3.4 | 0.3 |
| 396443 | 35 | 3.0 | 0.5 | 2.3 | 0.5 |
| 524403 | 35 | 3.3 | 0.4 | 2.5 | 0.5 |
| 1210339 | 35 | 2.5 | 0.5 | 3.0 | 0.3 |
| 1210340 | 35 | 2.1 | 0.6 | 2.6 | 0.4 |
| 1210341 | 35 | 1.8 | 0.7 | 2.0 | 0.6 |
| 1210342 | 35 | 2.5 | 0.5 | 2.9 | 0.3 |
| 1210343 | 35 | 3.0 | 0.4 | 2.4 | 0.5 |
| 1212817 | 35 | 2.4 | 0.6 | 2.2 | 0.6 |
| 1212818 | 35 | 2.4 | 0.5 | 2.1 | 0.6 |
| 1212823 | 35 | 2.0 | 0.6 | 2.0 | 0.6 |
| 1212824 | 35 | 2.1 | 0.6 | 2.1 | 0.6 |
| 1212825 | 35 | 2.9 | 0.4 | 2.5 | 0.5 |
| 1212826 | 35 | 2.5 | 0.6 | 2.2 | 0.7 |
| 1212827 | 35 | 2.5 | 0.6 | 2.6 | 0.5 |
| 1212828 | 35 | 2.9 | 0.5 | 2.4 | 0.6 |
| 1212830 | 35 | 2.8 | 0.7 | 2.1 | 0.8 |
| 1212831 | 35 | 2.5 | 0.7 | 2.3 | 0.7 |
| 1212832 | 35 | 2.9 | 0.6 | 2.9 | 0.5 |
| 1212833 | 35 | 2.4 | 0.7 | 2.7 | 0.5 |
| 1212837 | 35 | 2.5 | 0.6 | 2.7 | 0.5 |
| 1212838 | 35 | 2.1 | 0.7 | 2.5 | 0.6 |
| 1212844 | 35 | 2.6 | 0.6 | 2.4 | 0.7 |
| 1212845 | 35 | 2.3 | 0.7 | 2.5 | 0.7 |
| 1212846 | 35 | 2.8 | 0.6 | 2.6 | 0.6 |
| 1212849 | 35 | 2.1 | 0.7 | 2.3 | 0.6 |
| 1212850 | 35 | 1.8 | 0.8 | 2.2 | 0.7 |
| 1212855 | 35 | 2.0 | 0.7 | 2.1 | 0.8 |

TABLE 12
Effect of modified oligonucleotides on human SMN2
RNA splicing in homozygous transgenic mice

| Compound | Dose | CORTEX | | SPINAL CORD | |
|---|---|---|---|---|---|
| No. | (μg) | exon 7⁺ | exon 7⁻ | exon 7⁺ | exon 7⁻ |
| PBS | — | 1.0 | 1.0 | 1.0 | 1.0 |
| 396443 | 35 | 2.7 | 0.3 | 1.9 | 0.5 |
| 1210342 | 35 | 2.4 | 0.5 | 2.5 | 0.4 |
| 1212961 | 35 | 1.8 | 0.7 | 1.7 | 0.6 |
| 1212962 | 35 | 2.0 | 0.6 | 1.9 | 0.5 |
| 1212963 | 35 | 2.3 | 0.5 | 2.5 | 0.3 |
| 1212966 | 35 | 1.6 | 0.8 | 2.0 | 0.5 |
| 1212967 | 35 | 1.9 | 0.6 | 1.9 | 0.4 |
| 1212971 | 35 | 1.6 | 0.5 | 2.0 | 0.4 |
| 1212972 | 35 | 1.8 | 0.6 | 2.2 | 0.5 |
| 1212977 | 35 | 2.1 | 0.5 | 2.2 | 0.4 |
| 1212978 | 35 | 2.1 | 0.6 | 2.2 | 0.4 |
| 1212979 | 35 | 2.1 | 0.5 | 2.6 | 0.3 |
| 1212982 | 35 | 2.0 | 0.7 | 1.8 | 0.6 |
| 1212983 | 35 | 1.9 | 0.6 | 1.7 | 0.5 |
| 1212984 | 35 | 1.9 | 0.6 | 1.9 | 0.5 |
| 1212987 | 35 | 2.4 | 0.4 | 2.5 | 0.4 |
| 1212988 | 35 | 1.8 | 0.7 | 1.8 | 0.5 |
| 1212995 | 35 | 2.5 | 0.5 | 2.5 | 0.4 |
| 1212998 | 35 | 1.8 | 0.6 | 1.8 | 0.7 |
| 1212999 | 35 | 2.0 | 0.6 | 2.0 | 0.5 |
| 1213003 | 35 | 1.9 | 0.7 | 2.3 | 0.5 |
| 1213004 | 35 | 1.8 | 0.7 | 2.3 | 0.6 |

TABLE 13
Effect of modified oligonucleotides on human SMN2
RNA splicing in homozygous transgenic mice

| Compound | Dose | CORTEX | | SPINAL CORD | |
|---|---|---|---|---|---|
| No. | (μg) | exon 7⁺ | exon 7⁻ | exon 7⁺ | exon 7⁻ |
| PBS | — | 1.0 | 1.0 | 1.0 | 1.0 |
| 396443 | 35 | 2.6 | 0.5 | 3.1 | 0.5 |
| 1212964 | 35 | 2.5 | 0.6 | 3.6 | 0.4 |
| 1212965 | 35 | 2.9 | 0.5 | 3.3 | 0.4 |
| 1212968 | 35 | 2.2 | 0.6 | 2.3 | 0.6 |
| 1212973 | 35 | 2.6 | 0.5 | 3.2 | 0.4 |
| 1212974 | 35 | 2.3 | 0.6 | 2.8 | 0.5 |
| 1212975 | 35 | 2.9 | 0.3 | 3.1 | 0.4 |
| 1212976 | 35 | 2.5 | 0.5 | 2.8 | 0.5 |
| 1212980 | 35 | 2.6 | 0.5 | 3.2 | 0.4 |
| 1212981 | 35 | 2.9 | 0.4 | 3.6 | 0.3 |
| 1212985 | 35 | 2.4 | 0.6 | 2.9 | 0.5 |
| 1212986 | 35 | 2.8 | 0.4 | 3.3 | 0.4 |
| 1212989 | 35 | 3.3 | 0.3 | 3.6 | 0.2 |
| 1212990 | 35 | 1.8 | 0.8 | 2.1 | 0.7 |
| 1212991 | 35 | 3.2 | 0.3 | 3.8 | 0.3 |
| 1212992 | 35 | 2.4 | 0.5 | 2.2 | 0.6 |
| 1212996 | 35 | 2.2 | 0.6 | 3.2 | 0.5 |
| 1212997 | 35 | 2.9 | 0.4 | 3.9 | 0.4 |
| 1213001 | 35 | 2.1 | 0.5 | 2.8 | 0.6 |
| 1213002 | 35 | 2.0 | 0.6 | 2.9 | 0.6 |
| 1213005 | 35 | 2.8 | 0.5 | 3.2 | 0.3 |
| 1213006 | 35 | 1.9 | 0.9 | 2.0 | 0.8 |
| 1213007 | 35 | 3.3 | 0.2 | 2.9 | 0.5 |
| 1213008 | 35 | 2.3 | 0.7 | 2.2 | 0.7 |

TABLE 14
Effect of modified oligonucleotides on human SMN2
RNA splicing in heterozygous transgenic mice

| Compound | Dose | CORTEX | | SPINAL CORD | |
|---|---|---|---|---|---|
| No. | (μg) | exon 7⁺ | exon 7⁻ | exon 7⁺ | exon 7⁻ |
| PBS | — | 1.0 | 1.0 | 1.0 | 1.0 |
| 387954 | 35 | 2.3 | 0.6 | 2.2 | 0.5 |
| 396443 | 35 | 2.5 | 0.5 | 2.4 | 0.5 |
| 1287048 | 35 | 2.2 | 0.5 | 2.2 | 0.5 |
| 1287049 | 35 | 2.3 | 0.6 | 2.5 | 0.4 |
| 1287061 | 35 | 2.4 | 0.5 | 2.2 | 0.4 |
| 1287062 | 35 | 3.0 | 0.3 | 2.3 | 0.4 |
| 1287050 | 35 | 2.8 | 0.5 | 2.3 | 0.4 |
| 1287054 | 35 | 2.2 | 0.5 | 2.3 | 0.4 |
| 1287063 | 35 | 1.8 | 0.7 | 1.7 | 0.6 |
| 1287064 | 35 | 2.6 | 0.3 | 2.4 | 0.4 |
| 1287065 | 35 | 2.5 | 0.4 | 2.3 | 0.4 |
| 1287066 | 35 | 2.2 | 0.5 | 2 | 0.5 |
| 1287075 | 35 | 2.3 | 0.6 | 1.8 | 0.7 |
| 1287076 | 35 | 2.6 | 0.4 | 1.9 | 0.6 |
| 1287067 | 35 | 2.7 | 0.4 | 1.9 | 0.6 |
| 1287070 | 35 | 2.5 | 0.5 | 1.8 | 0.7 |
| 1287071 | 35 | 2.6 | 0.4 | 1.8 | 0.7 |
| 1287074 | 35 | 2.6 | 0.5 | 2 | 0.6 |
| 1287109 | 35 | 2.7 | 0.6 | 2.4 | 0.5 |
| 1287110 | 35 | 2.6 | 0.5 | 2.3 | 0.5 |
| 1287701 | 35 | 2.6 | 0.6 | 2.8 | 0.3 |
| 1287702 | 35 | 3 | 0.5 | 2.8 | 0.4 |
| 1287703 | 35 | 2.3 | 0.6 | 2.4 | 0.4 |
| 1287704 | 35 | 2.7 | 0.5 | 2.3 | 0.4 |
| 1287717 | 35 | 3.3 | 0.3 | 2.4 | 0.6 |

TABLE 15
Effect of modified oligonucleotides on human SMN2
RNA splicing in heterozygous transgenic mice

| Compound | Dose | CORTEX | | SPINAL CORD | |
|---|---|---|---|---|---|
| No. | (μg) | exon 7⁺ | exon 7⁻ | exon 7⁺ | exon 7⁻ |
| PBS | — | 1 | 1 | 1 | 1 |
| 396442 | 35 | 2.5 | 0.6 | 3.2 | 0.3 |
| 396443 | 35 | 3 | 0.5 | 2.8 | 0.5 |
| 1263783 | 35 | 3 | 0.3 | 2.6 | 0.5 |
| 1263785 | 35 | 3.1 | 0.4 | 2.9 | 0.5 |
| 1263787 | 35 | 2.4 | 0.6 | 2.9 | 0.4 |
| 1263789 | 35 | 3.8 | 0.2 | 2.6 | 0.5 |
| 1263800 | 35 | 3.6 | 0.2 | 2.6 | 0.5 |
| 1263802 | 35 | 3.4 | 0.3 | 2.9 | 0.4 |
| 1263806 | 35 | 3.5 | 0.2 | 2.7 | 0.5 |
| 1263808 | 35 | 3.2 | 0.4 | 2.7 | 0.5 |
| 1263810 | 35 | 2.8 | 0.5 | 2.4 | 0.5 |

TABLE 16
Effect of modified oligonucleotides on human SMN2
RNA splicing in heterozygous transgenic mice

| Compound | Dose | CORTEX | | SPINAL CORD | |
|---|---|---|---|---|---|
| No. | (μg) | exon 7⁺ | exon 7⁻ | exon 7⁺ | exon 7⁻ |
| PBS | — | 1 | 1 | 1 | 1 |
| 396443 | 35 | 2.5 | 0.6 | 2.9 | 0.4 |
| 1364784 | 35 | 2.3 | 0.7 | 2.8 | 0.5 |
| 1364783 | 35 | 2.9 | 0.5 | 2.4 | 0.5 |
| 1364777 | 35 | 2.7 | 0.6 | 2.3 | 0.5 |
| 1364782 | 35 | 2.7 | 0.6 | 2.6 | 0.5 |

TABLE 17
Effect of modified oligonucleotides on human SMN2
RNA splicing in heterozygous transgenic mice

| Compound | Dose | CORTEX | | SPINAL CORD | |
|---|---|---|---|---|---|
| No. | (μg) | exon 7⁺ | exon 7⁻ | exon 7⁺ | exon 7⁻ |
| PBS | — | 1 | 1 | 1 | 1 |
| 396443 | 35 | 2 | 0.7 | 2.7 | 0.5 |
| 1318748 | 35 | 2.1 | 0.7 | 2.5 | 0.6 |
| 1318782 | 35 | 2.2 | 0.8 | 2.5 | 0.6 |
| 1332262 | 35 | 3.3 | 0.4 | 2.9 | 0.5 |
| 1332258 | 35 | 2.4 | 0.7 | 2.3 | 0.6 |

### Example 3: Activity of Modified Oligonucleotides Complementary to Human SMN2 in Transgenic Mice, Single Dose (15 μg)

[0279] Activity of selected modified oligonucleotides described above was tested in human SMN2 transgenic mice essentially as described above in Example 2. Comparator Compound Nos. 396443 and 819735 were also tested in this assay. The transgenic mice were divided into groups of 4 mice each. Each mouse received a single ICV bolus of 15 μg of modified oligonucleotide. A group of 4 mice received PBS as a negative control. Two weeks post treatment, mice were sacrificed and RNA was extracted from cortical brain tissue and spinal cord for real-time qPCR analysis of SMN2 RNA expression. Results are presented as fold change in RNA levels relative to PBS control, normalized to total SMN2 levels. Each of Tables 18-22 represents a different experiment.

TABLE 18
Effect of modified oligonucleotides on human SMN2
RNA splicing in homozygous transgenic mice

| Compound | Dose | CORTEX | | SPINAL CORD | |
|---|---|---|---|---|---|
| No. | (μg) | exon 7⁺ | exon 7⁻ | exon 7⁺ | exon 7⁻ |
| PBS | — | 1.0 | 1.0 | 1.0 | 1.0 |
| 819735 | 15 | 2.4 | 0.4 | 3.3 | 0.3 |
| 1212869 | 15 | 2.4 | 0.4 | 3.2 | 0.4 |
| 1212870 | 15 | 2.1 | 0.5 | 2.8 | 0.4 |
| 1212873 | 15 | 2.2 | 0.4 | 2.0 | 0.6 |
| 1212874 | 15 | 2.1 | 0.5 | 2.4 | 0.6 |
| 1212875 | 15 | 2.1 | 0.5 | 2.3 | 0.5 |
| 1212880 | 15 | 1.7 | 0.6 | 2.0 | 0.6 |
| 1212881 | 15 | 1.8 | 0.6 | 2.3 | 0.6 |
| 1212885 | 15 | 2.3 | 0.4 | 2.4 | 0.5 |
| 1212887 | 15 | 2.0 | 0.5 | 2.2 | 0.5 |
| 1212931 | 15 | 2.9 | 0.2 | 2.9 | 0.3 |
| 1212936 | 15 | 2.9 | 0.3 | 3.3 | 0.3 |
| 1212941 | 15 | 3.0 | 0.1 | 3.4 | 0.2 |

TABLE 19
Effect of modified oligonucleotides on human SMN2
RNA splicing in heterozygous transgenic mice

| Compound | Dose | CORTEX | | SPINAL CORD | |
|---|---|---|---|---|---|
| No. | (μg) | exon 7⁺ | exon 7⁻ | exon 7⁺ | exon 7⁻ |
| PBS | — | 1.0 | 1.0 | 1.0 | 1.0 |
| 396443 | 15 | 2.2 | 0.5 | 2.2 | 0.7 |
| 819735 | 15 | 2.7 | 0.5 | 3.1 | 0.5 |
| 1287122 | 15 | 2.9 | 0.5 | 2.3 | 0.6 |
| 1287123 | 15 | 3.0 | 0.4 | 3.0 | 0.4 |
| 1287124 | 15 | 3.0 | 0.4 | 3.2 | 0.3 |
| 1287125 | 15 | 3.0 | 0.4 | 3.0 | 0.4 |
| 1287126 | 15 | 2.8 | 0.4 | 2.8 | 0.4 |
| 1287127 | 15 | 2.7 | 0.5 | 3.0 | 0.5 |
| 1287128 | 15 | 2.6 | 0.5 | 3.2 | 0.5 |
| 1287129 | 15 | 2.9 | 0.4 | 2.9 | 0.5 |
| 1287130 | 15 | 3.7 | 0.1 | 3.1 | 0.5 |
| 1287131 | 15 | 2.2 | 0.6 | 2.7 | 0.4 |
| 1287132 | 15 | 3.2 | 0.3 | 2.2 | 0.6 |
| 1287133 | 15 | 2.9 | 0.4 | 2.8 | 0.4 |
| 1287728 | 15 | 2.8 | 0.6 | 3.4 | 0.3 |
| 1287729 | 15 | 3.1 | 0.4 | 3.0 | 0.3 |
| 1287730 | 15 | 3.1 | 0.3 | 2.7 | 0.4 |
| 1287731 | 15 | 3.3 | 0.3 | 2.8 | 0.5 |
| 1287735 | 15 | 2.9 | 0.5 | 2.6 | 0.5 |
| 1287738 | 15 | 3.7 | 0.2 | 3.2 | 0.3 |
| 1287739 | 15 | 3.3 | 0.4 | 3.2 | 0.4 |
| 1287743 | 15 | 3.6 | 0.4 | 3.8 | 0.4 |
| 1287745 | 15 | 3.1 | 0.5 | 3.8 | 0.5 |

TABLE 20
Effect of modified oligonucleotides on human SMN2
RNA splicing in heterozygous transgenic mice

| Compound | Dose | CORTEX | | SPINAL CORD | |
|---|---|---|---|---|---|
| No. | (μg) | exon 7⁺ | exon 7⁻ | exon 7⁺ | exon 7⁻ |
| PBS | — | 1 | 1 | 1 | 1.0 |
| 396443 | 15 | 1.9 | 0.6 | 1.7 | 0.7 |
| 819735 | 15 | 2.3 | 0.5 | 1.9 | 0.6 |

TABLE 21
Effect of modified oligonucleotides on human SMN2
RNA splicing in heterozygous transgenic mice

| Compound | Dose | CORTEX | | SPINAL CORD | |
|---|---|---|---|---|---|
| No. | (μg) | exon 7⁺ | exon 7⁻ | exon 7⁺ | exon 7⁻ |
| PBS | — | 1 | 1 | 1 | 1 |
| 1364781 | 15 | 2.5 | 0.6 | 2.7 | 0.4 |
| 1364780 | 15 | 2.8 | 0.5 | 2.6 | 0.5 |
| 1364779 | 15 | 2.7 | 0.5 | 2.6 | 0.5 |
| 1364778 | 15 | 3 | 0.5 | 2.7 | 0.4 |

TABLE 22
Effect of modified oligonucleotides on human SMN2
RNA splicing in heterozygous transgenic mice

| Compound | Dose | CORTEX | | SPINAL CORD | |
|---|---|---|---|---|---|
| No. | (μg) | exon 7⁺ | exon 7⁻ | exon 7⁺ | exon 7⁻ |
| PBS | — | 1 | 1 | 1 | 1 |
| 819735 | 15 | 2.8 | 0.5 | 2.4 | 0.6 |
| 1332265 | 15 | 2.1 | 0.7 | 2.6 | 0.6 |
| 1332269 | 15 | 2.5 | 0.6 | 2.7 | 0.5 |
| 1332268 | 15 | 2.9 | 0.5 | 2.3 | 0.6 |
| 1318756 | 15 | 2.2 | 0.7 | 2.4 | 0.6 |
| 1333508 | 15 | 2 | 0.6 | 2.2 | 0.6 |
| 1332251 | 15 | 2.9 | 0.5 | 1.9 | 0.7 |
| 1332249 | 15 | 2.3 | 0.7 | 2.3 | 0.7 |

### Example 4: Activity of Modified Oligonucleotides Complementary to Human SMN2 in Transgenic Mice, Single Dose (70 μg)

[0280] Activity of modified oligonucleotides was tested in human SMN2 transgenic mice essentially as described above in Example 2. The transgenic mice were divided into groups of 4 mice each. Each mouse received a single ICV bolus of 70 μg modified oligonucleotide. A group of 4 mice received PBS as a negative control. Two weeks post treatment, mice were sacrificed and RNA was extracted from cortical brain tissue and spinal cord for real-time qPCR analysis of SMN2 RNA expression. Results are presented as fold change in RNA levels relative to PBS control, normalized to total SMN2 levels.

TABLE 23
Effect of modified oligonucleotides on human SMN2
RNA splicing in homozygous transgenic mice

| Compound | Dose | CORTEX | | SPINAL CORD | |
|---|---|---|---|---|---|
| No. | (μg) | exon 7⁺ | exon 7⁻ | exon 7⁺ | exon 7⁻ |
| PBS | — | 1 | 1 | 1 | 1 |
| 1212969 | 70 | 2.5 | 0.4 | 2.4 | 0.3 |
| 1212970 | 70 | 2.7 | 0.3 | 2.6 | 0.3 |

### Example 5: Activity of Modified Oligonucleotides Complementary to Human SMN2 in Transgenic Mice, Multiple Dose

[0281] Activity of selected modified oligonucleotides described above was tested in human SMN2 transgenic mice essentially as described above in Example 2. Comparator Compound No. 396443 was also tested in this assay. The transgenic mice were divided into groups of 4 mice each. Each mouse received a single ICV bolus of modified oligonucleotide at multiple doses as indicated in the tables below. A group of 4 mice received PBS as a negative control. Two weeks post treatment, mice were sacrificed and RNA was extracted from coronal brain and spinal cord for real-time qPCR analysis of SMN2 RNA expression. Results are presented as fold change in RNA levels relative to PBS control, normalized to total SMN2 levels. ED₅₀ for exon inclusion (exon 7+) was calculated in GraphPad Prism 7 using nonlinear regression, 4-parameter dose response curve [Y=Bottom+(Top−Bottom)/(1+(10\hat{ }log EC50/X)\hat{ }HillSlope)].

TABLE 24
Effect of modified oligonucleotides on human SMN2
RNA splicing in homozygous transgenic mice

| | | CORONAL | | | SPINAL | | |
|---|---|---|---|---|---|---|---|
| Compound | Dose | BRAIN | | ED50 | CORD | | ED50 |
| No. | (μg) | exon 7⁺ | exon 7⁻ | (μg) | exon 7⁺ | exon 7⁻ | (μg) |
| PBS | — | 1.0 | 1.0 | | 1.0 | 1.0 | |
| 396443 | 3 | 1.4 | 0.9 | 32.5 | 1.3 | 0.9 | 22.1 |
| | 10 | 1.8 | 0.8 | | 2.0 | 0.7 | |
| | 30 | 2.6 | 0.5 | | 2.6 | 0.4 | |
| | 100 | 3.5 | 0.4 | | 3.2 | 0.3 | |
| | 300 | 4.2 | 0.1 | | 3.6 | 0.2 | |
| 1263789 | 3 | 1.5 | 0.9 | 38.3 | 1.5 | 0.8 | 13.3 |
| | 10 | 2.0 | 0.7 | | 2.2 | 0.6 | |
| | 30 | 2.3 | 0.6 | | 3.0 | 0.4 | |
| | 100 | 3.4 | 0.3 | | 3.4 | 0.3 | |
| | 300 | 3.9 | 0.1 | | 3.7 | 0.2 | |
| 1287717 | 3 | 1.3 | 0.8 | 38.7 | 1.3 | 0.9 | 20.5 |
| | 10 | 1.8 | 0.7 | | 1.9 | 0.7 | |
| | 30 | 2.4 | 0.7 | | 2.7 | 0.5 | |
| | 100 | 3.5 | 0.4 | | 3.3 | 0.3 | |
| | 300 | 4.1 | 0.1 | | 3.8 | 0.2 | |
| 1358996 | 3 | 1.6 | 0.9 | 16.6 | 1.7 | 0.8 | 7.4 |
| | 10 | 2.5 | 0.6 | | 2.6 | 0.5 | |
| | 30 | 3.0 | 0.4 | | 3.5 | 0.2 | |
| | 100 | 4.0 | 0.2 | | 3.6 | 0.2 | |
| | 300 | 4.0 | 0.1 | | 3.9 | 0.1 | |
| 1287745 | 3 | 1.5 | 0.8 | 22.8 | 1.7 | 0.7 | 8.8 |
| | 10 | 2.1 | 0.6 | | 2.4 | 0.5 | |
| | 30 | 3.0 | 0.3 | | 3.3 | 0.3 | |
| | 100 | 3.6 | 0.1 | | 3.5 | 0.2 | |
| | 300 | 4.2 | 0.1 | | 3.8 | 0.1 | |

### Example 6: Tolerability of Modified Oligonucleotides Complementary to SMN2 in Wild-Type Mice, 3 Hour Study

[0282] Modified oligonucleotides described above were tested in wild-type female C57/B16 mice to assess tolerability. Wild-type female C57/B16 mice each received a single ICV dose of 700 μg of modified oligonucleotide listed in the tables below. Comparator Compound No. 396443 was also tested in this assay with a dose of 350 μg. Comparator Compound Nos. 387954, 396442, 443305, and 819735 were also tested in this assay with a dose of 700 μg. Each treatment group consisted of 4 mice. A group of 4 mice received PBS as a negative control for each experiment (identified in separate tables below). At 3 hours post-injection, mice were evaluated according to seven different criteria. The criteria are (1) the mouse was bright, alert, and responsive; (2) the mouse was standing or hunched without stimuli; (3) the mouse showed any movement without stimuli; (4) the mouse demonstrated forward movement after it was lifted; (5) the mouse demonstrated any movement after it was lifted; (6) the mouse responded to tail pinching; (7) regular breathing. For each of the 7 criteria, a mouse was given a subscore of 0 if it met the criteria and 1 if it did not (the functional observational battery score or FOB). After all 7 criteria were evaluated, the scores were summed and averaged within each treatment group. The results are presented in the tables below. Each of Tables 25-48 represents a different experiment.

TABLE 25
Tolerability scores in mice at 350 μg dose

| Compound | |
|---|---|
| Number | 3 hr FOB |
| 396443 | 3.5 |

TABLE 26
Tolerability scores in mice at 700 μg dose

| Compound | |
|---|---|
| Number | 3 hr FOB |
| 443305 | 4.75 |

TABLE 27
Tolerability scores in mice at 700 μg dose

| Compound | 3 hr |
|---|---|
| Number | FOB |
| PBS | 0 |
| 396442 | 2.5 |
| 524403 | 3.25 |
| 1210339 | 1.25 |
| 1210340 | 2.25 |
| 1210341 | 3.75 |
| 1210342 | 0 |
| 1210343 | 0 |
| 1212817 | 0 |
| 1212818 | 0 |
| 1212819 | 0 |
| 1212820 | 0 |
| 1212821 | 0 |
| 1212822 | 0 |
| 1212823 | 0 |
| 1212824 | 0 |
| 1212825 | 1 |
| 1212826 | 0 |
| 1212827 | 0 |
| 1212828 | 0 |
| 1212829 | 0 |
| 1212830 | 0 |
| 1212831 | 0 |

TABLE 28
Tolerability scores in mice at 700 μg dose

| Compound | 3 hr |
|---|---|
| Number | FOB |
| PBS | 0.00 |
| 396442 | 2.50 |
| 1210340 | 3.50 |
| 1212850 | 0.50 |
| 1212851 | 0.75 |
| 1212852 | 0.00 |
| 1212853 | 0.00 |
| 1212854 | 0.25 |
| 1212855 | 0.25 |
| 1212856 | 0.00 |
| 1212857 | 0.00 |
| 1212858 | 0.00 |
| 1212859 | 0.00 |
| 1212860 | 0.75 |
| 1212861 | 1.00 |
| 1212863 | 2.00 |
| 1212864 | 0.00 |
| 1212866 | 0.75 |
| 1212867 | 0.00 |
| 1212868 | 0.00 |

TABLE 29
Tolerability scores in mice at 700 μg dose

| Compound | 3 hr |
|---|---|
| Number | FOB |
| PBS | 0.00 |
| 396442 | 3.25 |
| 1212961 | 0.00 |
| 1212963 | 1.00 |
| 1212964 | 2.00 |
| 1212965 | 1.25 |
| 1212966 | 1.25 |
| 1212968 | 0.00 |
| 1212971 | 1.00 |
| 1212972 | 3.25 |
| 1212973 | 0.50 |
| 1212974 | 2.00 |
| 1212975 | 0.50 |
| 1212976 | 1.75 |

TABLE 30
Tolerability scores in mice at 700 μg dose

| Compound | 3 hr |
|---|---|
| Number | FOB |
| PBS | 0.00 |
| 1212977 | 0.75 |
| 1212978 | 0.00 |
| 1212979 | 1.75 |
| 1212980 | 1.50 |
| 1212981 | 0.00 |
| 1212982 | 0.50 |
| 1212983 | 0.75 |
| 1212984 | 2.75 |
| 1212985 | 0.00 |
| 1212986 | 1.00 |
| 1212987 | 1.75 |
| 1212988 | 4.50 |
| 1212989 | 1.75 |
| 1212990 | 4.50 |
| 1212991 | 1.25 |
| 1212992 | 3.75 |

TABLE 31
Tolerability scores in mice at 700 μg dose

| Compound | 3 hr |
|---|---|
| Number | FOB |
| PBS | 0.00 |
| 1212993 | 7.00 |
| 1212994 | 6.50 |
| 1212995 | 4.25 |
| 1212996 | 3.25 |
| 1212997 | 4.00 |
| 1212998 | 2.00 |
| 1212999 | 1.00 |
| 1213000 | 1.25 |
| 1213001 | 3.00 |
| 1213002 | 2.00 |
| 1213003 | 4.00 |
| 1213004 | 3.00 |
| 1213005 | 3.75 |
| 1213006 | 4.00 |
| 1213007 | 4.00 |
| 1213008 | 3.50 |

TABLE 32
Tolerability scores in mice at 700 μg dose

| Compound | 3 hr |
|---|---|
| Number | FOB |
| PBS | 0.00 |
| 1212832 | 0.00 |
| 1212833 | 0.00 |
| 1212834 | 0.00 |
| 1212835 | 0.00 |
| 1212836 | 0.00 |
| 1212837 | 0.00 |
| 1212838 | 0.00 |
| 1212839 | 0.00 |
| 1212840 | 0.00 |
| 1212841 | 0.00 |
| 1212842 | 0.00 |
| 1212843 | 0.00 |
| 1212844 | 0.25 |
| 1212845 | 1.00 |
| 1212846 | 0.00 |
| 1212847 | 0.00 |
| 1212848 | 0.00 |
| 1212849 | 0.00 |

TABLE 33

| Tolerability scores in mice at 700 μg dose | |
|---|---|
| Compound | 3 hr |
| Number | FOB |
| PBS | 0.00 |
| 396442 | 1.75 |
| 1210339 | 1.00 |
| 1212865 | 1.00 |
| 1212962 | 0.00 |
| 1212967 | 0.50 |
| 1212969 | 0.50 |
| 1212970 | 1.25 |

TABLE 34
Tolerability scores in mice at 700 μg dose

| Compound | 3 hr |
|---|---|
| Number | FOB |
| PBS | 0.00 |
| 819735 | 2.00 |
| 1212869 | 2.00 |
| 1212870 | 4.75 |
| 1212871 | 1.00 |
| 1212873 | 0.00 |
| 1212874 | 0.00 |
| 1212875 | 0.00 |
| 1212879 | 3.00 |
| 1212880 | 0.00 |
| 1212881 | 4.00 |
| 1212885 | 1.00 |
| 1212887 | 2.25 |
| 1212931 | 2.00 |
| 1212936 | 2.00 |
| 1212941 | 1.25 |

TABLE 35
Tolerability scores in mice at 700 μg dose

| Compound | 3 hr |
|---|---|
| Number | FOB |
| PBS | 0.00 |
| 1263778 | 0.00 |
| 1263781 | 0.00 |
| 1263783 | 0.00 |
| 1263785 | 1.00 |
| 1263787 | 0.00 |
| 1263789 | 0.00 |
| 1263791 | 0.00 |
| 1263793 | 0.00 |
| 1263795 | 0.00 |
| 1263797 | 0.00 |
| 1263799 | 0.00 |
| 1263800 | 0.00 |
| 1263802 | 0.00 |
| 1263804 | 0.00 |
| 1263806 | 0.00 |
| 1263808 | 1.00 |
| 1263810 | 0.00 |
| 1263812 | 0.00 |
| 1263814 | 1.00 |
| 1263816 | 0.50 |
| 1263818 | 0.00 |
| 1263820 | 0.00 |
| 1263822 | 0.25 |
| 1263824 | 0.00 |

TABLE 36
Tolerability scores in mice at 700 μg dose

| Compound | 3 hr |
|---|---|
| Number | FOB |
| PBS | 0.00 |
| 1263826 | 0.00 |

TABLE 37
Tolerability scores in mice at 700 μg dose

| Compound | 3 hr |
|---|---|
| Number | FOB |
| PBS | 0.00 |
| 387954 | 4.00 |
| 1287048 | 0.00 |
| 1287049 | 0.00 |
| 1287050 | 2.00 |
| 1287051 | 3.25 |
| 1287052 | 3.50 |
| 1287053 | 2.75 |
| 1287054 | 2.00 |
| 1287055 | 3.25 |
| 1287056 | 4.00 |
| 1287057 | 3.00 |
| 1287058 | 4.00 |
| 1287059 | 4.00 |
| 1287060 | 4.00 |
| 1287061 | 4.00 |
| 1287062 | 3.50 |

TABLE 38
Tolerability scores in mice at 700 μg dose

| Compound | 3 hr |
|---|---|
| Number | FOB |
| PBS | 0.00 |
| 1287106 | 3.50 |
| 1287107 | 4.00 |
| 1287108 | 3.75 |
| 1287109 | 3.25 |
| 1287110 | 3.00 |
| 1287111 | 4.75 |
| 1287112 | 4.00 |
| 1287113 | 3.50 |
| 1287114 | 3.25 |
| 1287115 | 3.50 |
| 1287116 | 4.00 |
| 1287117 | 4.25 |
| 1287118 | 3.00 |
| 1287119 | 3.50 |
| 1287120 | 3.75 |
| 1287121 | 2.75 |

TABLE 39
Tolerability scores in mice at 700 μg dose

| Compound | 3 hr |
|---|---|
| Number | FOB |
| PBS | 0.00 |
| 1287063 | 0.00 |
| 1287064 | 0.00 |
| 1287065 | 1.00 |
| 1287066 | 3.75 |
| 1287067 | 1.00 |
| 1287068 | 2.50 |
| 1287069 | 2.25 |
| 1287071 | 1.00 |
| 1287072 | 3.00 |
| 1287073 | 3.75 |
| 1287074 | 1.75 |
| 1287075 | 3.50 |
| 1287076 | 2.00 |

TABLE 40
Tolerability scores in mice at 700 μg dose

| Compound | 3 hr |
|---|---|
| Number | FOB |
| PBS | 0.00 |
| 1287070 | 2.00 |
| 1287701 | 2.50 |
| 1287702 | 3.75 |
| 1287703 | 3.75 |
| 1287705 | 4.00 |
| 1287706 | 4.00 |
| 1287707 | 4.00 |
| 1287709 | 4.75 |
| 1287710 | 4.00 |
| 1287711 | 4.75 |
| 1287712 | 4.00 |
| 1287713 | 4.00 |
| 1287714 | 3.50 |
| 1287715 | 4.00 |
| 1287716 | 4.00 |
| 1287717 | 3.25 |

TABLE 41
Tolerability scores in mice at 700 μg dose

| Compound | 3 hr |
|---|---|
| Number | FOB |
| PBS | 0.00 |
| 1287728 | 1.00 |
| 1287729 | 1.25 |
| 1287730 | 2.00 |
| 1287731 | 2.50 |
| 1287732 | 3.00 |
| 1287733 | 3.25 |
| 1287734 | 3.00 |
| 1287735 | 0.50 |
| 1287736 | 2.50 |
| 1287737 | 4.00 |
| 1287738 | 3.00 |
| 1287739 | 2.50 |
| 1287740 | 2.75 |
| 1287741 | 3.75 |
| 1287742 | 3.00 |
| 1287743 | 2.75 |
| 1287744 | 2.25 |
| 1287745 | 1.00 |

TABLE 42
Tolerability scores in mice at 700 μg dose

| Compound | 3 hr |
|---|---|
| Number | FOB |
| PBS | 0.00 |
| 1287122 | 0.00 |
| 1287123 | 0.00 |
| 1287124 | 3.50 |
| 1287125 | 3.00 |
| 1287126 | 3.00 |
| 1287127 | 0.00 |
| 1287128 | 0.00 |
| 1287129 | 4.00 |
| 1287130 | 2.75 |
| 1287131 | 2.50 |
| 1287132 | 2.75 |
| 1287133 | 3.25 |
| 1287704 | 3.50 |
| 1287708 | 3.50 |

TABLE 43
Tolerability scores in mice at 700 μg dose

| Compound | 3 hr |
|---|---|
| Number | FOB |
| PBS | 0.00 |
| 1318748 | 2.00 |
| 1318765 | 4.00 |
| 1318767 | 4.25 |
| 1318770 | 3.75 |
| 1318771 | 4.50 |
| 1318772 | 4.25 |
| 1318773 | 4.25 |
| 1318774 | 3.50 |
| 1318775 | 3.75 |
| 1318776 | 3.75 |
| 1318777 | 4.00 |
| 1318778 | 4.00 |
| 1318779 | 4.00 |
| 1318780 | 4.00 |
| 1318781 | 4.00 |
| 1318782 | 1.00 |
| 1318783 | 4.00 |
| 1318784 | 2.00 |

TABLE 44
Tolerability scores in mice at 700 μg dose

| Compound | 3 hr |
|---|---|
| Number | FOB |
| PBS | 0.00 |
| 1318757 | 4.00 |
| 1318758 | 4.25 |
| 1318759 | 3.75 |
| 1318760 | 3.75 |
| 1318761 | 4.00 |
| 1318762 | 4.00 |
| 1318763 | 4.00 |
| 1318764 | 3.75 |
| 1318766 | 3.75 |
| 1318768 | 4.00 |
| 1318769 | 4.00 |

TABLE 45
Tolerability scores in mice at 700 μg dose

| Compound | 3 hr |
|---|---|
| Number | FOB |
| PBS | 0.00 |
| 1318749 | 4.25 |
| 1318750 | 2.25 |
| 1318751 | 4.00 |
| 1318752 | 3.75 |
| 1318753 | 2.25 |
| 1318754 | 3.00 |
| 1318755 | 3.75 |
| 1318756 | 0.00 |

TABLE 46
Tolerability scores in mice at 700 μg dose

| Compound | 3 hr |
|---|---|
| Number | FOB |
| PBS | 0.00 |
| 1332247 | 1.75 |
| 1332248 | 0.25 |
| 1332249 | 0.00 |
| 1332250 | 3.75 |
| 1332251 | 0.00 |
| 1332252 | 3.00 |
| 1332263 | 2.00 |
| 1332265 | 1.50 |
| 1332266 | 1.00 |
| 1332267 | 3.75 |
| 1332268 | 2.75 |
| 1332269 | 1.25 |
| 1332270 | 2.25 |
| 1332271 | 2.50 |
| 1333508 | 0.00 |

TABLE 47
Tolerability scores in mice at 700 μg dose

| Compound | 3 hr |
|---|---|
| Number | FOB |
| PBS | 0.00 |
| 1332255 | 1.00 |
| 1332256 | 2.00 |
| 1332257 | 1.25 |
| 1332258 | 1.25 |
| 1332259 | 2.25 |
| 1332260 | 2.25 |
| 1332261 | 2.50 |
| 1332262 | 2.00 |

TABLE 48
Tolerability scores in mice at 700 μg dose

| Compound | 3 hr |
|---|---|
| Number | FOB |
| PBS | 0.00 |
| 1358996 | 0.00 |
| 1364777 | 2.00 |
| 1364778 | 3.00 |
| 1364779 | 3.50 |
| 1364780 | 3.50 |
| 1364781 | 5.25 |
| 1364782 | 2.50 |
| 1364783 | 3.50 |
| 1364784 | 3.50 |

### Example 7: Tolerability of Modified Oligonucleotides Complementary to Human SMN2 in Rats, Long-Term Assessment

[0283] In separate studies run under the same conditions, selected modified oligonucleotides described above were tested in Sprague Dawley rats to assess long-term tolerability. Comparator Compound Nos. 396442 and 819735 were also tested in this assay. Sprague Dawley rats each received a single intrathecal (IT) delivered dose of 3 mg of oligonucleotide or PBS. Beginning 1 week post-treatment, each animal was weighed and evaluated weekly by a trained observer for adverse events. Adverse events were defined as neurological dysfunction not typical in PBS-treated control animals, including, but not limited to: abnormal limb splay, abnormal gait, tremors, abnormal respiration, paralysis, and spasticity. The onset of the adverse event is defined as the week post-dosing when the dysfunction was first recorded. If no adverse event was achieved, there is no onset (−). The onset of adverse events typically correlates with a failure to thrive as defined by a lack of body weight gain/maintenance similar to PBS-treated animals. Similar tolerability assessments were described in Ostergaard et al., Nucleic Acids Res., 2013 November, 41(21), 9634-9650 and Southwell et al., Mol Ther., 2014 December, 22(12), 2093-2106.

[0284] At the end of the study, the rats were sacrificed and tissues were collected. Histopathology was performed on sections of cerebellum using calbindin stain. Purkinje cell loss was observed in calbindin stained cerebellum sections as indicated in the table below. Cerebellum and spinal cord were also evaluated using an antibody specific for modified oligonucleotides. Animals demonstrating no oligonucleotide uptake were excluded from histopathology analysis. Histology was not completed for animals that were sacrificed early due to adverse events. Additionally, cortical GFAP, a marker of astrogliosis (Abdelhak, et al., Scientific Reports, 2018, 8, 14798), was measured using RT-PCR, and average elevations >2-fold are noted below.

TABLE 49
Long-term tolerability in rats at 3 mg dose

| | | Purkinje cell | Cortex GFAP |
|---|---|---|---|
| | Adverse event onset, | loss (# animals | mRNA |
| Compound | weeks post-treatment, | with loss/# | >2-fold |
| Number | individual animals | animals tested) | PBS Control |
| PBS | No | Not observed | N/A |
| 396442 | 6, 6, 2 | 2/3 | Yes |
| 819735 | 4, 6, 6, — | 1/4 | Yes |
| 1263789 | —, —, — | 0/3 | No |
| 1287717 | —, —, —, —, —, —, —, — | 0/8 | No |
| 1287745 | —, —, —, —, —, —, — | 0/7 | No |
| 1358996 | —, —, —, — | 0/4 | No |
| 1263783 | —, —, —, — | 0/4 | No |
| 1263785 | —, —, — | 0/3 | No |
| 1263787 | —, —, —, — | 0/4 | No |
| 1263800 | —, — | 0/2 | No |
| 1263802 | —, —, — | 0/3 | No |
| 1263806 | —, —, — | 0/3 | No |
| 1263808 | —, —, — | 0/3 | No |
| 1263810 | —, —, — | 0/3 | No |

### Example 8: Tolerability and Pharmacokinetics of Modified Oligonucleotides in Non-Human Primates, Single or Repeat Dosing

[0285] Cynomolgus monkeys are treated with modified oligonucleotides to determine the local and systemic tolerability and pharmacokinetics of the modified oligonucleotides. Each group receives either artificial CSF or modified oligonucleotide as a single intrathecal lumbar bolus dose injection (IT), or, for repeat-dosing groups, an IT bolus dose on day 1 of the study, followed by IT bolus doses at later time points. Tissues are collected 1 week after the final injection.

[0286] In a single dose study, monkeys are administered a single dose of modified oligonucleotide and tolerability is assessed. Representative doses for single-dose studies in adult cynomolgus monkeys include 1 mg, 3 mg, 7 mg, and 35 mg.

[0287] In a repeat-dosing study, monkeys are administered an IT bolus dose on day 1 of the study, followed by weekly (e.g., days 8, 15, and 22 for a four-week study) or monthly (e.g., days 29, 57, and 84 for a 13 week study) IT bolus dosing. Representative doses for repeat-dose studies in adult cynomolgus studies include 1 mg, 3 mg, 7 mg, and 35 mg.

[0288] Assessment of tolerability is based on clinical observations, body weights, food consumption, physical and neurological examinations including sensorimotor reflexes, cerebral reflexes and spinal reflexes, coagulation, hematology, clinical chemistry (blood and cerebral spinal fluid (CSF)), cell count, and anatomic pathology evaluations. Complete necropsies are performed with a recording of any macroscopic abnormality. Organ weights are taken and microscopic examinations are conducted. Blood is collected for complement analysis. In addition, blood, CSF, and tissues (at necropsy) are collected for toxicokinetic evaluations.

[0289] Tolerability of modified oligonucleotides is analyzed in brain and spinal cord tissue by measuring Aif1 and Gfap levels in cynomolgus monkeys treated with the modified oligonucleotide or the control. Brain and spinal cord samples are collected and flash frozen in liquid nitrogen and stored frozen (−60° C. to −90° C.). At time of sampling, 2 mm biopsy punches are used to collect samples from frozen tissues for RNA analysis. Punches are taken from multiple brain and spinal cord regions.

### Example 9: Phase Ta Human Clinical Trial with Compound No. 1263789, 1287717, 1287745, or 1358996

[0290] Safety, tolerability, pharmacokinetics, pharmacodynamics and efficacy of modified oligonucleotide complementary to human SMN2 is evaluated in a clinical trial setting. Single and/or multiple doses of modified oligonucleotide are evaluated in patients with confirmed SMA, such as Type I SMA, Type II SMA, Type III SMA, or Type IV SMA.

[0291] Patient safety is monitored closely during the study. Safety and tolerability evaluations include: physical examination and standard neurological assessment (including fundi), vital signs (HR, BP, orthostatic changes, weight), ECG, AEs and concomitant medications, Columbia Suicide Severity Rating Scale (C-SSRS), CSF safety labs (cell counts, protein, glucose), plasma laboratory tests (clinical chemistry, hematology), and urinalysis.

[0292] Efficacy evaluations are selected that are age and Type appropriate and include, for example, the Hammersmith Motor Function Scale-Expanded (HFMSE), which is a reliable and validated tool used to assess motor function in children with SMA; the Pediatric Quality of Life Inventory (PedsQL™) Measurement 4.0 Generic Core Scale; the Pediatric Quality of Life Inventory 3.0 Neuromuscular Modules; the Compound Muscle Action Potential (CMAP); the Motor Unit Number Estimation (MIUNE); the Upper Limb Module (ULM); and the 6-Minute Walk Test (6MWT) (Darras, et al., Neurology, 2019, 92: e2492-e2506).

### Example 10: Design of Modified Oligonucleotides Complementary to a Human SCN1A Nucleic Acid

[0293] Modified oligonucleotides complementary to a human SCN1A nucleic acid are designed and synthesized as indicated in Table 50 below.

[0294] The modified oligonucleotides in Table 50 are 18, 19, or 20 nucleosides in length, as specified. The modified oligonucleotides comprise 2′-MOE sugar moieties, as specified. The sugar motif for each modified oligonucleotide is provided in the Sugar Motif column, wherein each ‘e’ represents a 2′-MOE sugar moiety. The internucleoside linkage motif for each modified oligonucleotide is provided in the Internucleoside Linkage Motif column, wherein each ‘s’ represents a phosphorothioate internucleoside linkage, and each ‘o’ represents a phosphodiester internucleoside linkage. Each cytosine is a 5-methyl cytosine.

[0295] Each modified oligonucleotide listed in Table 50 below is 100% complementary to SEQ TD NO: 2 (the complement of GENBANK Accession No. NC_000002.12 truncated from nucleotides 165982001 to 166152000), unless specifically stated otherwise. “Start site” indicates the 5′-most nucleoside to which the modified oligonucleotide is complementary in the target nucleic acid sequence. “Stop site” indicates the 3′-most nucleoside to which the modified oligonucleotide is complementary in the target nucleic acid sequence.

TABLE 50
2′-MOE modified oligonucleotides with mixed
PS/PO internucleoside linkages

| | | | Inter- | | | |
|---|---|---|---|---|---|---|
| | Nucleo- | | nucleo- | SEQ | SEQ | |
| | base | | side | ID | ID | |
| | Se- | Sugar | Linkage | No: | No: | |
| | quence | Motif | Motif | 1 | 1 | SEQ |
| Compound | (5′ to | (5′ to | (5′ to | Start | Stop | ID |
| Number | 3′) | 3′) | 3′) | Site | Site | No. |
| 1472459 | AGTTGGA | eeeeeee | soossss | 144708 | 144725 | 64 |
| | GCAAGAT | eeeeeee | sssssss | | | |
| | TATC | eeee | sss | | | |
| 1472453 | AGTTGGA | eeeeeee | sososss | 144708 | 144725 | 64 |
| | GCAAGAT | eeeeeee | sssssss | | | |
| | TATC | eeee | sss | | | |
| 1472454 | AGTTGGA | eeeeeee | sosssos | 144708 | 144725 | 64 |
| | GCAAGAT | eeeeeee | sssssss | | | |
| | TATC | eeee | sss | | | |
| 1472455 | AGTTGGA | eeeeeee | sosssss | 144708 | 144725 | 64 |
| | GCAAGAT | eeeeeee | ossssss | | | |
| | TATC | eeee | sss | | | |
| 1472460 | AGTTGGA | eeeeeee | sssooss | 144708 | 144725 | 64 |
| | GCAAGAT | eeeeeee | sssssss | | | |
| | TATC | eeee | sss | | | |
| 1472462 | AGTTGGA | eeeeeee | sssssss | 144708 | 144725 | 64 |
| | GCAAGAT | eeeeeee | oosssss | | | |
| | TATC | eeee | sss | | | |
| 1472463 | AGTTGGA | eeeeeee | sssssss | 144708 | 144725 | 64 |
| | GCAAGAT | eeeeeee | ssoosss | | | |
| | TATC | eeee | sss | | | |
| 1472464 | AGTTGGA | eeeeeee | sssssss | 144708 | 144725 | 64 |
| | GCAAGAT | eeeeeee | ssssoos | | | |
| | TATC | eeee | sss | | | |
| 1472456 | AGTTGGA | eeeeeee | sosssss | 144708 | 144725 | 64 |
| | GCAAGAT | eeeeeee | ssossss | | | |
| | TATC | eeee | sss | | | |
| 1472457 | AGTTGGA | eeeeeee | sosssss | 144708 | 144725 | 64 |
| | GCAAGAT | eeeeeee | ssssoss | | | |
| | TATC | eeee | sss | | | |
| 1472458 | AGTTGGA | eeeeeee | sosssss | 144708 | 144725 | 64 |
| | GCAAGAT | eeeeeee | sssssss | | | |
| | TATC | eeee | oss | | | |
| 1472466 | AGTTGGA | eeeeeee | ssossss | 144708 | 144725 | 64 |
| | GCAAGAT | eeeeeee | sssssss | | | |
| | TATC | eeee | oss | | | |
| 1472467 | AGTTGGA | eeeeeee | ssssoss | 144708 | 144725 | 64 |
| | GCAAGAT | eeeeeee | sssssss | | | |
| | TATC | eeee | oss | | | |
| 1472461 | AGTTGGA | eeeeeee | sssssoo | 144708 | 144725 | 64 |
| | GCAAGAT | eeeeeee | sssssss | | | |
| | TATC | eeee | sss | | | |
| 1472468 | AGTTGGA | eeeeeee | sssssso | 144708 | 144725 | 64 |
| | GCAAGAT | eeeeeee | sssssss | | | |
| | TATC | eeee | oss | | | |
| 1472472 | AGTTGGA | eeeeeee | sssssss | 144708 | 144725 | 64 |
| | GCAAGAT | eeeeeee | sosssso | | | |
| | TATC | eeee | sss | | | |
| 1472469 | AGTTGGA | eeeeeee | sssssss | 144708 | 144725 | 64 |
| | GCAAGAT | eeeeeee | sosssss | | | |
| | TATC | eeee | oss | | | |
| 1472470 | AGTTGGA | eeeeeee | sssssss | 144708 | 144725 | 64 |
| | GCAAGAT | eeeeeee | sssosss | | | |
| | TATC | eeee | oss | | | |
| 1472473 | AGTTGGA | eeeeeee | sssssss | 144708 | 144725 | 64 |
| | GCAAGAT | eeeeeee | ssssoso | | | |
| | TATC | eeee | sss | | | |
| 1472471 | AGTTGGA | eeeeeee | sssssss | 144708 | 144725 | 64 |
| | GCAAGAT | eeeeeee | sssssos | | | |
| | TATC | eeee | oss | | | |
| 1472465 | AGTTGGA | eeeeeee | sssssss | 144708 | 144725 | 64 |
| | GCAAGAT | eeeeeee | sssssso | | | |
| | TATC | eeee | oss | | | |
| 1472452 | AAGTTGG | eeeeeee | ossssss | 144707 | 144726 | 65 |
| | AGCAAGA | eeeeeee | sssssss | | | |
| | TTATCC | eeeeee | sssso | | | |
| 1472451 | AGTTGGA | eeeeeee | sssssss | 144707 | 144725 | 66 |
| | GCAAGAT | eeeeeee | sssssss | | | |
| | TATCC | eeeee | ssso | | | |
| 1472450 | AAGTTGG | eeeeeee | ossssss | 144708 | 144726 | 67 |
| | AGCAAGA | eeeeeee | sssssss | | | |
| | TTATC | eeeee | ssss | | | |

### Example 11: Activity and Tolerability of Modified Oligonucleotides Complementary to SCN1A in Wild-Type Mice

### Treatment

[0296] Modified oligonucleotides described in Table 50 were tested in wild-type female C57/B16 mice to assess the activity and tolerability of the oligonucleotides. Wild-type female C57/B16 mice each received a single ICV dose of 700 μg of modified oligonucleotide as listed in the table below. Each treatment group consisted of 3 mice. A group of 4 mice received PBS as a negative control.

### Activity

[0297] To confirm splice-modulating activity of the modified oligonucleotides of Table 50, eight weeks post treatment, mice were sacrificed and RNA was extracted from cortical brain tissue for quantitative real-time RTPCR analysis of SCN1A RNA using mouse primer probe set RTS48951 (forward sequence CCCTAAGAGCCTTATCACGATTT, designated herein as SEQ ID NO: 23; reverse sequence GGCAAACCAGAAGCACATTC, designated herein as SEQ ID NO: 24; probe sequence AGGGTGGTTGTGAATGCCCTGTTA, designated herein as SEQ ID NO: 25) to measure the amount of SCN1A RNA that excludes the mouse form of a nonsense mediated decay (NMD)-inducing exon NIE-1 (NIE-1⁻) and primer probe set RTS48949 (forward sequence AGCCCTTTATTATGGGTGGTT, designated herein as SEQ ID NO: 20; reverse sequence CCAGAATATAAGGCAAACCAGAAG, designated herein as SEQ ID NO: 21; probe sequence TGGATGGAATTGCTCCTAACAGGGC, designated herein as SEQ ID NO: 22) to measure the amount of SCN1A RNA that includes the mouse form of NIE-1 (NIE-1*). SCN1A RNA is presented as % of the average of the PBS control (% control), normalized to mouse GAPDH. Mouse GAPDH was amplified using primer probe set mGapdh_LTS00102 (forward sequence GGCAAATTCAACGGCACAGT, designated herein as SEQ ID NO: 29; reverse sequence GGGTCTCGCTCCTGGAAGAT, designated herein as SEQ ID NO: 30; probe sequence AAGGCCGAGAATGGGAAGCTTGTCATC, designated herein as SEQ ID NO: 31). As shown in Table 51 below, the compounds demonstrated activity in this assay.

TABLE 51
Effect of modified oligonucleotides on amount of mouse SCN1A
excluding NIE-1 (NIE-1⁻) and the amount of mouse SCN1A
RNA including (NIE-1⁺) in wildtype mice, single dose

| | CORTEX | |
|---|---|---|
| Compound | NIE-1⁻ | NIE-1⁺ |
| No. | % control | % control |
| PBS | 100 | 100 |
| 1472450 | 154 | 8 |
| 1472451 | 169 | 3 |
| 1472452 | 171 | 9 |
| 1472453 | 158 | 2 |
| 1472454 | 139 | 8 |
| 1472455 | 156 | 4 |
| 1472456 | 170 | 4 |
| 1472457 | 178 | 2 |
| 1472458 | 197 | 4 |
| 1472459 | 199 | 12 |
| 1472460 | 178 | 2 |
| 1472461 | 185 | 5 |
| 1472462 | 192 | 6 |
| 1472463 | 197 | 4 |
| 1472464 | 198 | 2 |
| 1472465 | 175 | 4 |
| 1472466 | 162 | 1 |
| 1472467 | 169 | 4 |
| 1472468 | 169 | 2 |
| 1472469 | 148 | 4 |
| 1472470 | 145 | 4 |
| 1472471 | 150 | 3 |
| 1472472 | 150 | 4 |
| 1472473 | 152 | 1 |

### Tolerability

[0298] Modified oligonucleotides described in Table 50, and Comparator compound 1367010, were tested in wild-type female C57/B16 mice to assess the tolerability of the oligonucleotides. Comparator compound 1367010, previously described in WO 2019/040923 (incorporated herein by reference) as Compound Ex 20X+1 has a nucleobase sequence of (from 5′ to 3′) AGTTGGAGCAAGATTATC (SEQ ID NO: 64), wherein each nucleoside comprises a 2′-MOE sugar moiety and each internucleoside linkage is a phosphorothioate internucleoside linkage. Wild-type female C57/B16 mice each received a single ICV dose of 700 μg of modified oligonucleotide as listed in Tables 52 and 53 below.

[0299] Each treatment group for each of the modified oligonucleotides in Table 51 below consisted of 3 mice. The treatment group for Comparator compound 1367010, shown in Table 52 below, consisted of 4 mice. A group of 4 mice received PBS as a negative control for each experiment. At 3 hours post-injection, mice were evaluated according to seven different criteria. The criteria are (1) the mouse was bright, alert, and responsive; (2) the mouse was standing or hunched without stimuli; (3) the mouse showed any movement without stimuli; (4) the mouse demonstrated forward movement after it was lifted; (5) the mouse demonstrated any movement after it was lifted; (6) the mouse responded to tail pinching; (7) regular breathing. For each of the 7 criteria, a mouse was given a subscore of 0 if it met the criteria and 1 if it did not (the functional observational battery score or FOB). After all 7 criteria were evaluated, the scores were summed for each mouse and averaged within each treatment group.

[0300] As shown in the data provided in Tables 52 and 53 below, the compounds described in Table 50 were more tolerable than comparator compound 1367010 in this assay.

TABLE 52
Tolerability scores in mice

| Compound | FOB 3 |
|---|---|
| No. | hour |
| PBS | 0 |
| 1472450 | 3.33 |
| 1472451 | 3.00 |
| 1472452 | 2.33 |
| 1472453 | 1.00 |
| 1472454 | 2.33 |
| 1472455 | 1.33 |
| 1472456 | 1.00 |
| 1472457 | 2.67 |
| 1472458 | 1.33 |
| 1472459 | 1.67 |
| 1472460 | 1.67 |
| 1472461 | 2.00 |
| 1472462 | 2.67 |
| 1472463 | 2.67 |
| 1472464 | 2.00 |
| 1472465 | 3.67 |
| 1472466 | 2.67 |
| 1472467 | 3.67 |
| 1472468 | 3.33 |
| 1472469 | 2.67 |
| 1472470 | 2.67 |
| 1472471 | 3.00 |
| 1472472 | 2.67 |
| 1472473 | 3.33 |

TABLE 53
Tolerability scores in mice

| Compound | Dose | FOB |
|---|---|---|
| No. | (μg) | 3 hour |
| PBS | N/A | 0 |
| 1367010 | 700 | 7 |

### Example 12: Tolerability of Modified Oligonucleotides Complementary to Human SCN1A in Mice, Long-Term Assessment

[0301] Long-term tolerability may be assessed in surviving mice. Each animal is weighed and evaluated weekly by a trained observer for adverse events. Adverse events are defined as neurological dysfunction not typical in PBS-treated control animals, including, but not limited to: abnormal limb splay, abnormal gait, tremors, abnormal respiration, paralysis, and spasticity. Similar tolerability assessments are described in Ostergaard et al., Nucleic Acids Res., 2013 November, 41(21), 9634-9650 and Southwell et al., Mol Ther., 2014 December, 22(12), 2093-2106.

[0302] At the end of the study, the mice are sacrificed and tissues are collected. Histopathology is performed on sections of cerebellum using calbindin stain. The calbindin stained cerebellum sections may be evaluated for Purkinje cell loss. Cerebellum and spinal cord may also be evaluated using an antibody specific for modified oligonucleotides. Animals demonstrating no oligonucleotide uptake are excluded from histopathology analysis. Histology is not completed for animals that are sacrificed early due to adverse events. Additionally, cortical GFAP, a marker of astrogliosis (Abdelhak, et al., Scientific Reports, 2018, 8, 14798), may be measured using RT-PCR, and average elevations >2-fold are noted.

### Example 13: Tolerability of Modified Oligonucleotides Complementary to Human SCN1A in Rats, Long-Term Assessment

[0303] In separate studies run under the same conditions, modified oligonucleotides described in Table 50 and comparator compound 1367010 were tested in Sprague Dawley rats to assess long-term tolerability. Sprague Dawley rats each received a single intrathecal (IT) delivered dose of 3 mg of oligonucleotide or PBS. Beginning 1-week post-treatment, each animal was weighed and evaluated weekly by a trained observer for adverse events. Adverse events are defined as neurological dysfunction not typical in PBS-treated control animals, including, but not limited to: abnormal limb splay, abnormal gait, tremors, abnormal respiration, paralysis, and spasticity. The onset of the adverse event is defined as the week post-dosing when the dysfunction was first recorded. If no adverse event was achieved, there is no onset (−). If the animal died prior to 1-week due to acute toxicity, long term adverse effects could not be verified, and such cases are marked with a ‘Ø’ symbol. Similar tolerability assessments are described in Ostergaard et al., Nucleic Acids Res., 2013 November, 41(21), 9634-9650 and Southwell et al., Mol Ther., 2014 December, 22(12), 2093-2106.

[0304] At the end of the study, the rats are sacrificed and tissues were collected. Histopathology was performed on sections of cerebellum using calbindin stain. The calbindin stained cerebellum sections were evaluated for Purkinje cell loss. Purkinje cell loss was observed in calbindin stained cerebellum sections as indicated in the table below. Cerebellum and spinal cord were also evaluated using an antibody specific for modified oligonucleotides. Animals demonstrating no oligonucleotide uptake were excluded from histopathology analysis. Histology was not completed for animals that were sacrificed early due to adverse events. In cases where purkinje cell loss could not be evaluated due to death of mice in less than a week post treatment, the values are indicated as ‘N/A’. Additionally, cortical GFAP, a marker of astrogliosis (Abdelhak, et al., Scientific Reports, 2018, 8, 14798), was measured using RT-PCR, and average elevations >2-fold are noted below. In cases where GFAP levels could not be evaluated due to death of mice in less than a week post treatment, the values are indicated as ‘N/A’.

TABLE 54
Long-term tolerability in rats at 3 mg dose

| | | Purkinje | |
|---|---|---|---|
| | | cell loss | |
| | Adverse | (# | Cortex |
| | event onset, | animals | GFAP |
| | weeks post- | with | mRNA |
| | treatment, | loss/# | >2-fold |
| Compound | individual | animals | PBS |
| Number | animals | tested) | Control |
| PBS | —, —, —, — | 0/4 | 100 |
| 1367010 | Ø, Ø, Ø, Ø | N/A | N/A |
| 1472450 | —, —, —, — | 0/4 | 151 |
| 1472451 | —, 7, —, —, | 2/4 | 128 |
| 1472452 | —, —, 7, —, | 0/4 | 112 |
| 1472453 | —, —, —, — | 1/4 | 100 |
| 1472454 | —, —, —, — | 0/4 | 136 |
| 1472455 | —, —, —, — | 0/4 | 116 |
| 1472456 | —, —, —, 7 | 0/4 | 140 |
| 1472457 | —, —, —, — | 0/4 | 135 |
| 1472458 | —, —, —, 3 | 0/4 | 118 |
| 1472459 | —, —, —, — | 0/4 | 129 |
| 1472460 | —, —, —, — | 1/4 | 130 |
| 1472461 | —, —, —, — | 0/4 | 130 |
| 1472462 | —, —, —, — | 0/4 | 130 |
| 1472463 | —, —, —, — | 0/4 | 118 |
| 1472464 | —, —, —, — | 0/4 | 111 |
| 1472465 | —, —, —, — | 0/4 | 119 |
| 1472466 | 7, —, 7, 7 | 1/4 | 159 |
| 1472467 | —, —, —, — | 0/4 | 120 |
| 1472468 | —, —, — | 0/3 | 148 |
| 1472469 | —, —, —, — | 0/4 | 123 |
| 1472470 | —, —, —, — | 0/4 | 150 |
| 1472471 | —, —, —, — | 0/4 | 142 |
| 1472472 | —, —, —, — | 0/4 | 125 |
| 1472473 | —, —, —, — | 0/4 | 115 |

### Example 14: Tolerability of Modified Oligonucleotides Complementary to Human SCN1A in Rats, 3 Hour Study

[0305] Modified oligonucleotides described above were tested in rats to assess the tolerability of the oligonucleotides. Sprague Dawley rats each received a single intrathecal (IT) dose of 3 mg of oligonucleotide listed in the table below. Each treatment group consisted of 4 rats. A group of 4 rats received PBS as a negative control. At 3 hours post-injection, movement in 7 different parts of the body were evaluated for each rat. The 7 body parts are (1) the rat's tail; (2) the rat's posterior posture; (3) the rat's hind limbs; (4) the rat's hind paws; (5) the rat's forepaws; (6) the rat's anterior posture; (7) the rat's head. For each of the 7 different body parts, each rat was given a sub-score of 0 if the body part was moving or 1 if the body part was paralyzed (the functional observational battery score or FOB). After each of the 7 body parts were evaluated, the sub-scores were summed for each rat and then averaged for each group. For example, if a rat's tail, head, and all other evaluated body parts were moving 3 hours after the 3 mg IT dose, it would get a summed score of 0. If another rat was not moving its tail 3 hours after the 3 mg IT dose but all other evaluated body parts were moving, it would receive a score of 1. Results are presented as the average score for each treatment group.

[0306] Comparator compound 1367010, described hereinabove, was tested in Sprague Dawley rats to assess the acute tolerability of the oligonucleotides.

TABLE 55
Tolerability scores in rats (n = 4) at 3 mg dose

| Compound | 3 hr. |
|---|---|
| No. | FOB |
| PBS | 0.00 |
| 1367010 | 6.00 |

TABLE 56
Tolerability scores in rats (n = 4) at 3 mg dose

| Compound | 3 hr. |
|---|---|
| No. | FOB |
| PBS | 0.00 |
| 1472450 | 1.00 |
| 1472451 | 2.00 |
| 1472452 | 2.75 |
| 1472453 | 2.25 |
| 1472454 | 3.00 |
| 1472455 | 1.50 |
| 1472456 | 2.25 |
| 1472457 | 2.25 |
| 1472458 | 3.00 |
| 1472459 | 2.25 |
| 1472460 | 2.75 |
| 1472461 | 2.25 |
| 1472462 | 2.25 |
| 1472463 | 1.50 |
| 1472464 | 1.25 |
| 1472465 | 2.25 |
| 1472466 | 3.00 |
| 1472467 | 2.25 |
| 1472468 | 4.00 |
| 1472469 | 1.75 |
| 1472470 | 3.00 |
| 1472471 | 2.25 |
| 1472472 | 2.25 |
| 1472473 | 0.00 |

The application's sequence listing, which the Patent Office published only in electronic form, follows.

SEQUENCE LISTING (121 sequences)

SEQ ID NO: 1 - DNA, 28070 bp, Homo sapiens
ccacaaatgtgggagggcgataaccactcgtagaaagcgtgagaagttactacaagcggtcctcccggccaccgtactgttccgctcccagaagccccgggcggcggaagtcgtcactcttaagaagggacggggccccacgctgcgcacccgcgggtttgctatggcgatgagcagcggcggcagtggtggcggcgtcccggagcaggaggattccgtgctgttccggcgcggcacaggccaggtgaggtcgcagccagtgcagtctccctattagcgctctcagcacccttcttccggcccaactctccttccgcagcctcgggacagcatcaagtcgatccgctcactggagttgtggtccgcgtttttctacgtcttttcccactccgttccctgcgaaccacatccgcaagctccttcctcgagcagtttgggctccttgatagcgttgagtggaggccctgccgcgacttggcagtagcttattttgttcactcctctctggctggtgtgggggaggtgggggcattaggccagggtgaagcaggggaaccacttaggagtctgttaagatgatctgaacttcagaacaagatgttattaacagagtgaaagtatttggattctgggtatattttgaaatcggaggcaacaggtttttcagatagattcgataacggaggttatcctgaatagttgaaaagataaagttgccttttgctgaggtgggaaagagaagattgccagtagagcaggtttctcaggagttcagtcttgggcatagcatggtaggggtgaatttggctggagtgagttggagagtaggagaagagaaatccaaggcaacatttgaccagcctgggcaacatagtgtgactccgagtctgcaaaaattagacgggtgttgtggtgcgcgtctgtggtctcagctacctggaaggttcaggccttggaaggctcagggaggtggaggctgcagtgatctgtgattgcgcctctgcactccagcctgggcgacagagccagaccctgtcttaaaacaaaataaacggccgggcgcggtggctcaagcctgtaatcccagcactttgggaggccgaggcggccggatcacaaggtcaggagatcgagaccatcctggctaacacggtgaaaccccgtctctactacaaatacaaaaaattagccgggcgtggtgacgggcgcctgtagtcccagctactcgggaggctgaggcaggagaatgtcatgaagccgggaggcggagcttgcagtgagccgagatcgcgccactgcactccagcctgggcgatagagcaagactccgtctcaaataaataaataaataaataaataaataataaaaacatcggtaggcatatttcaaggaattctatttaaaaaaaatttttttagagacaagttcgctctctgtggcccaggctggagtacagtggcatgatcctagcccatggcagcgttgatctcttggcctcaagcgaccctcctttggagtcgctgggcctaaaggagtgagccaccacgaaattttattataaatggagggtagagaaattgggcaataaatggagggggaagtgagttaagaggaattttaattatgtgtgtgtggttttaaaagaggggggtcttgctctgttgcccaggctgctggggtgccagtggcgcaatcatgaatcactacagccttggactcctggcctcaagctatcctcccacctctgcctcccaaagtactgggattactagtgtgagccactgcactaagataggagcaacatgtttcagcatgtttgtgggttgataggaaagatgagaatgggaaagttgatgtcggaaagaagacaatggctagagcaatgtcctagagtaggtaagaagggatggatttggcctttgttggaaacattagcggttcttttggtgacagctatatagttaacacatctatgatacgtgaatgggcagataggatggcaggagattttgaaagttctcttgattcttactgttctcttagtgaaagaagcaaggttatcagctagaagctgggatgggagaggaaagagaagatgggaagtagatagttctttagaagagtgggcaagggttggactagggaagtttagtggaaatattgctaggcaacataaagagcctacttgagattcgtggtcatgagttgaaggagaccagacagcaagattgtgtatgagggcacccacagagtaaatggagagttgaaattaatgcagttgtgattttaccacgtggatatgaagaagtgagggggagaagtacaaaggagttctcttaatgattgaccatggaatttaagctggctaagaaaggaagtgagaggccgggcgcggtggctcacgcctgtaatcccagcactttgggagactgaggtgggtggattacctgaggtcaggagtttgagaccaacctggccgatatggcgaaaccccatctctaataaaaatacagaaaaattagccgggaatggtggcaggtgcctgtaatcccagctactcaagaggctgtggcaggagtatcccttggacccaggaggtggaggttgcagtgagccgagatcacgccactgtactccagcctggacgatatagtgagacttcacctcaaaaaaaaaaaaaaagaaaggaagtgaggattttaagaccctgagagacagtttaaaaagtgggaggatcggccgggcgctgtggctgacacctgtaatcccagcactttgggaggccgagttgggcagatcacaaggtcaggagttcgagaccagcctggccaatatggtgaaaccttgtctctactaaaaatacaaaaattagccgggcatggtgtcacgtgtctataatcccagctactcgggaggctgaggcagaaaaattgcttgaacctgggaggcagaggttgcagacagctgagatcactccattgcactccagcctgggcaacaagagcaaaactttgtctttaaaaaaaaaaaaaaaaaaagaatacaaaaattagccgggcgtggtggcgcgtgcctataatcccagctacttgggaggctgaggcaggagaatcagttgaacacgggaggcgaggtttgcagtgagccgagattgcgccactgcactccagcctgggcgacagagcaggactcctcttggaaaaaaaaaattagctgggcatggtggcaggtgcctgtagtctcagctactagggaggctgaggcaggaaaatcacttgaacccgggatgtggagtttgcagtgacccgagatcgtgccactgtactccatcctgggcgacaaaatgagactctgcctcaaaaaaaaaaaaaaaaaaaagtgggaggatcaatgtactgccagtcctaatgaagtggaatgattgtccccatcaaatcactagtaggagtaagttgcagagcctagaaggtgatggttaagagagtgggattcttgaaactgcatttatggagaggttgtggttattggttataataaataaatacagttgaagtgagtgagtagctgagatttggggatgtatcagttcattcttacactgctacaaagacatacctgagaccaggtatttataaagataagaggtttaatcagctcacagttctgctgcctgtacaggcttctcttgtggaggcctaaggaaacttacagtcatggtggaaggtgaaggggaaacaagcacagtcttcacatggccagcaggagagagagagaagggggaagtgctacatactttaaaacaaccagatcttgtgagaacgcttatcaggaaacagcacttggggatggtgctaaatcattagaaatcacccccatgatccagtcgcctcctaccatgcccacctccaacactggggatcacaattcagcatgagatttgggtaggaacacagagctgcaccacatcagaggatgtacaagattgtggtggagaggagtttagagacctgcaaatatagggtaattgaagggatcatctacatggatatttaaatcaccaaaaattatgacaggagtagtgttggagagagaactgcgatgtaaacattaaggaatgaggaagagtgactcggtaggctgtaggtgactgcaataggaaacgataatagactgtgagtctggtgacaagattttccttctttctttttttccccccccccgagacagggcctctttttgttgcccaggtgggagtgcagtggcgcgatcacggctcactacaacctcctcccaagctcaagggattctcccacttcagcctctcaagtagctggaactacaggtgctgaccaccatgcctggctactttttgtcaggattttcaaggctgggaattttgagaggggaatggaggagaataatctgaaagtgcaagtaaggagcagggaagatttcttttttcttttttttttttttttttgagtcggagtctggctcagtcgcccaggctggagtgcagtggcgagatctccgctcactgcaagctccgcctcccgtgttcacgccattctcctccttcagcctcccgagtagctgggactacaggcgcccgccaccacgcccagctaattgtttttttgtatttttagtagagacggggtttcaccgtgttagccaggatggtctcaatctcctgactttgtgatccgcccaccccggcctcccaaagcgcttgggattacaggcgtgagccaccgcgccagccagagcagggaagatttcttccccacatctccagtaggtacagtgatatgaagtgtgtggaggagaaaagaggaaacatctatcatttgagatggctgcgaaaggaaaaggcatcctcagggagctagattttacttagagcaagaaatgaagggatgattcagaggttaaaagagtggattttatgaattactcaagggagcacagtggaagtttcaggaagtggtaggagaaggtagaagatggcagggtgttgggaataatttgagaaatctgagctactggaaatgactgagaatcagatataaaggcagtcctggtggtccgttctggctgccgttgctgtgtaacgaatctgccaaaacttagtggcttgaaacaacaaagaacattttattatctctcattgtttctgtgggttaggaatttgtgagagccgtgctgggcagttttcgtgcggctgtctcgtggttgcacctacatagttgctagagctacagtagctggggactgagcagctagggattggcaggctatctctttttttcatgtagtctcatgaagatttctttatgtggtttcaatgtgtgggctggtttggatttccttatagcatggtggcctcagttggattgctgttttgtgatccttttcatccctccttgtcctgtccccagacaaccactgatctactttctgtcaccatagattagcctgcatttttaagaatttttataaacgtggaatgatagagtaccttttttgtcacgtttcttttatttatcatagctattttgattttcatccattttattgctgagtagtatcccattgcatgtatatactatactgtattcattcgcttgcttgtgaacatttgggctttttccagtttgggactgttaacaagtagagccactatgaatattagtgtataagacttcatatagccaaggctggcagatcgcttgagcccaggagtttgagaccagcctgggaaacatggtgaaacctctatttttattttaaaatcaaaaattaaaaattttctataaaaaattttaaagaagactttgtatagacatacgctttcatttttcttgagtgaatacttaggtctcagggtagatgtattttaagtctttaaggagctgtcaaactcttcctcaaagtggtggttgtaccatgttactttttaatataacagagattaattgagcaaagaaaaattcaaaagttggacagcccccacaactaaataggttcagaacagctcccccattttgcattttgaccagcaatgtatgaaagttccatttgctcagtgtccctgcaaacacctggtatggtcagtctttttaattttaggcattataatagatatagtggcttcttgtgattttaattagcatttcctaatgaccagtgctgctgttgatcatttcatgagtgtatttgccatccgtatatcttttttggtgaagtgtctattcaaatcatttgggttttttttttttttgttttttttttttggagacagtgtctcactctgtcacccaggctgttgtgcagtggtgcaatcacacagcctactgcagcctccacctcctgcgctcagtcttcttgtctcagccttctgagtagctgaaattacgagcacacgccacaatgcctggctaattttttaaaattttgtagaaacaaggtctcattatgttgcctgggcttgtcgtgaactcctgggctcaagcaatcttcctgcctcagcctcccaaagattgggattgcaagtatgagccactgcacccggccaacttacccatcttttaattgaatttttttgttgttgaggtttgagagttcttcatgtttgctgggtacaatatctttatcagataggtaacttgcatgtattttctcccggtttacactttggtttttcattttgttaacaacgtctttttaagaacagaaaatcttaattttgctgaaatctaatttttcagttttttctttgatggttttgagagaggaggtaaaaaaagactaggtaagccgatagttagacagagtcctcggtagaacttcccttctaacaaaaagcagcccaagaaatcacttctcttctaacaaggagcagcctggaagatcgggctgtaaacatgtataaggaagcagctctggcacagagggggagcttcctgggtaatcagcaagcttcacatacgtaaggtgggtatgtgaagtaaacacagtatgtgaagtaaacacagtggaccttagtacatactcagataaggaagctggaagcttgcatgttgtgagttgttggggttgcctgcagctgcacggagagaaaggggtacctggggccaggcatgtccaccatggtggctccacctccccttatttagcacatgcacaataggaaagagataagcaatgtggagtagctcaggccaaggacctgcctgcataataaaaggttggggtgggggatgccagagattcacgctctgtgcagatggcaacacctggtcctaactggttttttgctccctatgtgtagataagctacccccttcccattagctcatttataaaaatgcttgcatttcactgtggaatgggaactcttttcaggacctctctctgcaggagagagctagtctctttcttttgcctattaaacttctgctctagcctcacacccttggtgtgtcagcgtccttgatttcctcagcgtgagaccaagaacctcgggtgccaccccaggcaacaaggccatttcagtttgttcttttgttataggcaatccatgatcacagatttttctctcttttttttttttacacagtttagagttttagttttacacttaggtctgtaatccattttgtattaattcttatatgtggctcagtgtaggtggaaatttggtttgtttttgcataaggatttccaatagttttaccaccatttcttgaaactactatgctttctctattaaaccacatttgtaactttagttaaaatcagtcacatatatcacagggctatttctgactctcaattctgttacattgtctattagtgtatattgatgtcagtactacacttttaattactattgcttcagggtatgtcttgtaaaccaaaaataaaattataggccccccccgcccctgcacaaccaactgaatggacccatcctctcagccaagggcattccaaaattaacctgaaaaactagttcaagccatgatgggaagggggagttggacatgtctcatcacaccctactaccttttggaattactgatagaacagactcttaaagtctgaaaagaaacatttacaacctaccctctctgaagcctgctacctgggagcttcatctgcatgataaaaccttggtctccacaaccccttatggtaacccaaacattcctttctgttgataataactctttcaactagttgccaattagaaaatctttaaatcttcctatgacctagaaacctccctacccccactttgagttgtcctgcctttcctgacagaactcatgtacatcttacatatattgattgatgcctcatgtctccctaaaatgtataaaacaaagctgtaccccaccaccttggggacatgtcatcaggacctcctgtggctgtgtcataggagcgtctttaactttggcaaaataaactttctaaattgattgaaacctgtcttagctacttctggtttacagtcttaaagttagataatgtaaattgtccagctttggtttatttttgtccttagtagttccatataaattttagaatcagcttttcaatttaatacactactttcctcttagatccacaattaaatatatttgatgctaacaattctgttttatgtttttcgttttttttttttgagacaagagtttcgctcttgttgcccaggctggagtgcagtggcgcgatcttggctcaccacaacctccacctcccaggttcaagcaattcttctgcctcagcctcccgagtagctgggattacaggcatgcgccaccacgcccggctaattttgtatttttagtagagacggggtttcaccatgttgatcaggctggtcttgaactcctgacctcaggtgatccacccacctcggcctcccaaagtgttgggattacaggcgtgaaccaccatgcctggccagttctgttatttttaaaacccaagtttccctggtcatatcttggttggatgaagcgtattttcaatagattaccctggaaaggctagtgagtacggtattcttctacattttagacttttcttagtcttgctacttcaaggacagctaggctgcatataaaattcttggctcatactttttccccataaatttctatgagaaagtctaatgataactgattttctttattttgtaacttagtctttttgcttagaggctctctgaggatgggagggggttcttcctcccatccctaggaatttttcttttttttaaattcctaatcactagaccaccaggaagattgtttgttttgttttgtttttattcttcagggaccccatttatacatacgttaaataaatactgtttgccaatgtatcaaccattttgcttcttatttatttttgttcctttggttctttttcatggctttgctttggtgctccttagattttcagtcagatgtatttgtccttgggtaccttgtaatcagtattaccttttcttctgtcgctttgttttctgttcgttttgaaattacttgtttcctggtctggcaataacagttgagatatgaggagtttgagctgccatctgtctatgtatcttgctttaagactgcactcttctattgatatcactggccttgattttgtgatttctttatttcttcaggaccacccttcattttctactgtttgcttcctttttttttgagatggagtctcactctgtcactcaggctggagtgcagtgatcttggctcattgcaacctctgcctcccgggttccagcaattctcctgcctcagcctcccaagtatctgggactacaggtgtgcaccaccatgcccggctaagttttgtatttttaatagagacggggttttgccacattggcaggctggtctcaaactcctgatgtcaagtgatccacccaccccacccacctctgcatcccaaagtgctgggattacaggaatgagctgccgtgcccagcctcccccctacccccctttttttctttcgagacagagattataggtgtgagccactggacccagcctgtttttattccttttaccaaatctccaaggaatatcttcccttccaagtgcgaatgtaaccttaagtcagttaacctctttgtgattacttttcttatctgcaaagtgacttaatgatcttaagtactttttttttttgagacagggtctcactgtcaccctggctggagtgcagtggcacgatctctgatctccactcactgcaatctcctcttccctggttcaagcggccctcccaccttagccttctgggtagctgggactacagatgtgaaccaccacgcccagctaatttttgtactttttgtagagatggggttttgccatgttgcccaggctgggattattaagtactttttatcatacagcaagattgacattttatattggaatacatttgtctctatataacggagattaacaggaaaatgacaagcctgggtgcggtggctcatgcctgtaatcccagcactttgggaggctgaggtgggaggatcacttgaggtcaggagttcgagaccagttttgccaagatgatgaaagcccatgtctactaaaaatacaaaaattagcccagcttgatggtgggcgcctataatcccagctatttgagagactgaggcaggagaatcacttgaacctgggcagcagaggttgcagtgagccgagatcatgccactgcactccagcctgggtggcatagcgagactcttgtctcaagagaaaacaaaacaaaacaaaaaaaaaacaggaaaatgacaaaaagtaatattacaactcagtgaattttataacaaacttttttggaattcattgactaatactataccaaatccaaaatactctctagtataccaaatccaactctaccctatagtataaattggattctatttggacttgtctcactaatccctcatacagtgtgttttattttttattgaagtaaaaaaatttgtcattttaaccatttttaagtatatagttcagtaatattaagtatgttcatgttgttgcgcaatagatcttcggaagtttttcgtcttgcaacctgaaactctacccattagcaaattcccatttctccttacacttagcccttggtaatcatcattcttttttttttttttttgagatggagttttactcttgttgcccaggctggagtgcaatggtgcaatctcgactcaccacaacctccgcctcccaggttcaagcaattctacctcagcctcccgagtagctgggattacagtcatgcaccaccacgcccggctaattttgtatttttagtagagaaggggtttctccatgttgaggctggtctcgaactcctgacctcaggtgatctgcccacctcggcctcccaaagtgctgggattacaggcgtgagccactgcgcctggcccattctttctaattctataaatttgactacttagttaccttacataaataaattcttatagttagtgttatttttgcttccatgccttttttgttgttgttcatgctcttacttggaatgcgttctattttgtctacctatgcacatcctgttgggttttttttttttttgggggttttttttgtttttttttgtttttttttcccagacaaggtctcaatttgttacccaggctggagtgcagcggcgccatctccactcactgcatcctcaacttcctgggcccaggtgatcctctcgcctcagcccctgcaggtagctgggactataggcatgtgccaccatgcccagctaaatttggtttttttgtttgtttgtttttgagacagagtctcactctgtcacccaggctggagtgcagtggcacaatctcagctcactgcaatctctgccgcccgggttcaagtgattctcctgcctcagcctcccaagcagctgggattacaggtgactgccaccacgccagctaagttttgtagttttagtagagatggggtttcaccttgttggccatgctggtctcgaactcctgacctcgtgatctgcctgcttctgcctcccaaagtgctggaattacaggcatgagccaccacgcccggccagaatttttgtatttttagtagacacaaggttcttaccctgttgcctaggctggtctggaagtcctggactcaagcaattcacctgccttggcctcccaaaatgctgggattacaagccaccatgcccggcctaaatcctgttgttttgttttgttttattttgttttgttttgttttgtttgttttttgagacagagtctcgctatgtctctcaggctgtagtgcagtggcgcgatcttggctcactgccacctctgcctcccaggttcaagtgattctcctgcctcagcctcccaagtagctgggattacaggcatgtgctactatgtccggctaatttttgtatttttagtagagacagggtttcaccatgttggccaggctggtctcgaactcctgacctcgtgatccacccacctcggccacccaaagtgctgggattacaggcgtgagtggtttttatttcttaggccggtttcctccatatgatcttgcagtagacattaatttctttcctttttaattaaaatactgtttgtatttcacattttgatgtttgttaagatttgttttatattgttttttgttttgtcttgtgtgatagtcttaaatccctagttagataataactggagagtaccatgtttctatatatctctcagtgacttgcacagtgctagcagatagtgctaaaaaattatttattattattattattttgttattgttgttgttgttgttagacagggtcttcctctgtcacccaggctagagggcaatgggatgatcatagcttactgcagcctccaacaactgggctcatgtaattctcctgcctcagcttcccaagtagctgggattacaggcatgagccaccatgtctggacaaaaatatttccaggtgcagtggctcatgcctgtaattcccacacttgggaggccgagcgaggctggaggatcacttgagcctaggagttcaagaccagcttggctaagatggcgagaccccgtccctacaaaaaattttaaaaactagccaggcatggtggcatgcacctatattcccaactactcagtgggctgaggtgggagggtcatttgaacacaggaatttgaggggagaaaaaaagaagagagaaagagaagtgaaggaaggaagaaaggaaggagggagggagagaagaaagaaacgaaagaaaggaaaagaaaaggaaggaaagaaaattggtaccaggaaagcaggaaagggaaatggaagtaaaaaaataataataataataaaatgaaaattggttagtcactattaacaatttgtatccttataatctggaaacattataatttcaaaagaaaaaatattctttggatcataggttctgaggtcagaacagcattcccgtagtctagatgaagtcaagttttatctgatcttaattgaaataaatatagctggccttgaacaaatctactcatggtatgtggataggaattaaattgtaggggcattcacttgatggcattcattcttagaacatttacctatgtctagcttttggagtaaagtcacataacctctaaccaggtaagtttcctgtggctttatttaggattttaaatactcattttcagtgtaattttgttatgtgtggattaagatgactcttggtactaacatacattttctgattaaacctatctgaacatgagttgtttttatttcttaccctttccagagcgatgattctgacatttgggatgatacagcactgataaaagcatatgataaagctgtggcttcatttaaggtatgaaatgcttgcttagtcgttttcttattttctcgttattcatttggaaaggaattgataacatacgataaagtgttaaagtacatgttattcagttttcattttgaagattagatggtagtatgagttagttaaatcaggtgatatcctcctttagaagttgatagcctatatatgtcatcctttgtggaggcaatttaaataaaatttaaaacatttattcctggctgggtatggtggctcactcctgtaatcccagcactttgagaggctgaggcgggtggatcacctgaggtcaggagtttgagaccagcctggccaacatggtgaaaccccgtctttactaaaaatacaaaaattagccaagcatggtggcacgtgcctgtaatcccagctgcttgggacactgaggcaggagaattgcttgaacctggggggcagaggttgcaatgattgcaccactgcactccagcctgggcgatagagtgagactccatctcagaaaacgaacaaacaatgtattccttttagtatttttacattgtatcaaactatggaagtcctctaattgagattaataagaaaaagacaatctgaattataattttaaacatttaacaagcatgtagtaaaataatgatgaagataaatagcattagtacagcaattaatatttgtagcatgctgacagtgctctgtgtgcgtttcatatattaaattactctaatcatcccaaatcctgtaagttgggtatcaattcaagtgttcctattgggtaggaatatacagttcttttaggaaatgtagtatggttctgtgtctcaaacaggacacttacacagttggccaacatcatcaccttctccattctctgagatgtttagtcttactgagcactaaatatgggtcatcaatagtccagactaccttgagcaaacaatagtccagactaccttgagcaaacagagcatatactcatacagtgtataaagagcaccaagcatacagatttcatgtctttctcatagttactcttgtaacatgagctaaagatcagacctctatgtcacctttgtaactgatttctagatttttttttttttttgagatggggtcttgccctgtcacccaggctggagtgtagtggcgtgatcatgcctcattggagccttcaactcatgagctcaaacaatcctcctacctcagcttcctgagtagttgggaccacaggtgtgtgccaccacacccagctcatttttgtattctttgtagagatgcagtctcaccctgttgcccacgctggcctggaactcctgagctcaaaagatccctccgccttgaccttccaaagtgctgggattacaagcatgaaccactgcacccggcctagatttttaaatgtgctttccagtatacactgaaactagaagtcgactaaagaattaccaagagaattctataaaatagagattgaaatggggctcgatgtgggatgggttggtgatattgcagggagaagtaatctgagtaaaggaggaaaagaactgatttgggaaaacgatagttttagtagtgagtttgagtatgaattaagttgagattgaatttgaattaagttgaggttgaatatgaattaagttgaggttgagtttgaggtatgaattaagatgtgaaattgatcattggaaatgttagattgagaaaagtcacagctggattaatagcttcagaagtgtgtttgcagacagttgcaactaaagtaataagaatagatggccttggccgggcgcggtggctcacgcctgtaatcccagtactttgggaggctgaggcgagcaaatcacgaggtcaggagttcaagaccagcctggcccacatggtgaaaccccgtctttattaaaaatacaaaaattagctgtgcacagtggtgcacgcctgtaatcccagctactcgggaggctgagacaggagaatcgcttgaacctgggaggtggaggttgcagtgagctgagatcagtgtgactgcactccagcccggtgacagagtgagactctgtgtaaaaaaataaaataaataaaataatggccgtaagcaagtaaagaaggatggccagctcttattgggaatgcctaaatctaaggcttgatcagaagtaatgaaaccgttggggccctacattgctatgacatccaaagggccatgaatatcaggaagaaagataattaacagggtctaatgttacagagaggttgagagcaaggagatttgattaaaagggtctttagagctgatgtcaggtgtatgatgcctttaagagcagtttttatagtgcagggggtggtcaaaagagaaaataggtgctttctgaggtgacggagccttgagactagcttatagtagtaactgggttatgtcgtgacttttattctgtgcaccaccctgtaacatgtacatttttattcctattttcgtagcatgctctaaagaatggtgacatttgtgaaacttcgggtaaaccaaaaaccacacctaaaagaaaacctgctaagaagaataaaagccaaaagaagaatactgcagcttccttacaacaggttattttaaaatgttgagatttaacttcaaaggatgtctcattagtccttatttaatagtgtaaaatgtctttaacttaagtgattagtacagtgtttctattgacatatacttatacaacttcaaaaacaactattaaattttctgttatttaggaacatgcatattagtcatgaaagtataaagaattagatgggaatgataaatgctaaaatcaggacatgtgttccatttgtgaatggaaggcagggagaaggtgccgtttggaaggagtacccaagagccgtaagctgaattggcagtgttttacatcttaagctgagagatagatttttttttcccctttttctttaaaaactctaaaactgttaattccaaggaacccagaagtctaggtagattatttctgctagttaaaagcagtagtcctgaaagctgaatattttggtgtcttttgagccaactttagtttcatcattaccaagggggaagagagctaacagttgatgagcacttgctctaggccagtccagagtgctgggcaccatacgcattttatctccctcccgctattcacaacaaatatgggaggtagtttatattatagccatctaataagatggggaaactaagactcaaagagattcagaaacttgtccatgattataaatgtaagagagttggaattcagatttatgtatttagaccccaagcctttctcattacatcattttgccttccaaatctctaccctctatccttcacctccccactgatcaaaacgagatgatagtttgccctcttcaaaagaaatgtgtgcatgtatatatctttgatttcttttgtagtggaaagttggggacaaatgttctgccatttggtcagaagacggttgcatttacccagctaccattgcttcaattgattttaagagagaaacctgtgttgtggtttacactggatatggaaatagagaggagcaaaatctgtccgatctactttccccaatctgtgaagtagctaataatatagaacaaaatgctcaagaggtaaggatacaaaaaaaaaaaaattcaatttctggaagcagagactagatgagaaactgttaaacagtatacacagttgtcagtttgatccaccgaggcattaattttttcttaatcacacccttataacaaaaacctgcatattttttctttttaaagaatgaaaatgaaagccaagtttcaacagatgaaagtgagaactccaggtctcctggaaataaatcagataacatcaagcccaaatctgctccatggaactcttttctccctccaccaccccccatgccagggccaagactgggaccaggaaaggtaaaccttctatgaaagttttccagaaaatagttaatgtcgggacatttaacctctctgttaactaatttgtagctctcccatgaaacttttgtagcttaaatacacaagaattttttgaaaaggaaataagataatgatgcaaaatagttaattttttaaaaaaatgttagacactgcagtggatgcaacaaaatactttatatgaaagatttatccagttaacttttgtggagtattaggtattagactaataattagcacacttacttaagttagaaagtataataatgcgccggacgcggtagctcacgcctgtaatcccagcactttgggaggccaaggtgggcggatcacaaggtcaggagatcgagaccatcctggctaacacggtgaaaccccatctctactgaaaatacaaaaaaatttgccgggcgtgatggcgggcacctgtagtcccagctactcgggaggctgaggcaggaggatggtgtgaaccccggaggcagagcttgcagtgagtcaagatcgtgccactgcactccaacctgggcgacagaatgagactccatctcaaacaaaaaaacaaaacaaaacaaaaaaaagtgtaataataatttatcattagctggatgatatgctgttgtttcccatgtcacctgtataagatatgtaaaataagaacacattatttacatctaatatagataaaatcctgaggcgctctcagattgttttgtagagttcaaatgtaaatattgttttcatttatggtccttttggttataagtaacagaaatcaactctaaaaagatttttattataggttagattatgtcatggaaccttaaggcttgtccctttctagttcttttgtgtaaagcggtgatttcttccatggagggaatggtatttaggcaatttttttttttttttcgagatggagtcttgctctgtcgctcaggctggagtgcagtggcaccatttcagctcactgcaacttccacctcctgggttcaagtgattctcctgcttcagcctcccaagtagctgagattacaggcacccgccaccacacccggcttattttgtatttttagtagagatggggtttcaccatgttggccaggctggtcttgaactcctgacctcaagtgatctccccaccttggccttccaaagtgctaggattacaggcgcctagcctaggcagtcattttcaaaaaacaagcatgactcaccaaaagttttaagattttctgtgataatgttcttattgaggcttacattatattacagtttcttgaatctaaaatgatgtaccctcttagaatatatacatcatgcttcattggtctcagggggctgatttttataaggagagatttgctagttttcacaatatgtcctctaagttggcatgtatagctaaacaggctttcataaaaatatacaatttagttaatgaaatttgggatatagtcttttatgattgaaataattttgctaaatagactgtctctgatttattaggtaatcaccactcttattttgttttacttccttaatgtctacatagaaaggaaatgagaaaaatccagaggttgtcatttgacttatgagtctgtttgacttcaggatttggtacatgaaatttcacttaatctttttgatatgtataaaacaaatattctgggtaattatttttatccttttggttttgagtcctttttattcctatcatattgaaattggtaagttaattttcctttgaaatattccttatagccaggtctaaaattcaatggcccaccaccgccaccgccaccaccaccaccccacttactatcatgctggctgcctccatttccttctggaccaccagtaagtaaaaaagagtataggttagattttgctttcacatacaatttgataattagcagaatagaggattgtaaaatgtcattgtagaacatcccttgggccagattctaatgggtagaaatttgaactaaacctctgggttttgtttgtttttaatgcctttctgttacccagatgcagtgctcttgtagtcccaagtctaagctctaggttgccttctttcctggcagaagttggtgtctatgccataaggaggtagttcctgttagaagggatttaattataccttatataaggaattagtgtttgcccttctaggtatagttggatgttagcttctgatgtaaactggatttctttttctttctctctctttttttttttttgttttggaggcagagttttgcccttgtaccccaggctggagtgcagtggtgtgatctcagctcacagcaacctccgcctcctgggttcaagcaattctgcctcggcctcccaagtagctgggattacaggcgactgccaccacacccggctaatttttgttttattagtagagatggggtttcaccatgttggccagactgatcttgaactcctgacctcaggtgatccacccgccttggcctcccaaagcgctgggattacaggcgtgagctgccgcacccagctgtaaactggatttctaatggtagatttttaggtattaacaatagataaaaagatactttttggcatactgtgtattgggatggggttagaacaggtgttctacccaagacatttacttaaaatcgccctcgaaatgctatgtgagctgtgtgtgtgtgtgtgtgtgtgtgtgtattaaggaaaagcatgaaagtatttatgcttgattttttttttttactcatagcttcatagtggaacagatacatagtctaaatcaaaatgtttaaactttttatgtcacttgctgtcttttcgtcctcgttaaatttaattttgttggtcttttgttgttattggttggttttctccaaatgctagctatgttaagaaatttaaggccaggtacagtggctcatgcctgtaatcccggcattttagaaggctgaggcaggaggatcacttgagctcaggagtttgagaccagtctgggcaacatagcaagacctcgtctttgtttaggggaaaaaaaagaaatttaagtaggagattatataagcaaaaatacaattaatttccagcattcactatataatataaatctccagactttacttttttgtttactggatataaacaatatctttttctgtctccagataattcccccaccacctcccatatgtccagattctcttgatgatgctgatgctttgggaagtatgttaatttcatggtacatgagtggctatcatactggctattatatggtaagtaatcactcagcatcttttcctgacaatttttttgtagttatgtgactttgttttgtaaatttataaaatactacttgcttctctctttatattactaaaaaataaaaataaaaaaatacaactgtctgaggcttaaattactcttgcattgtccctaagtataattttagttaattttaaaaagctttcatgctattgttagattattttgattatacacttttgaattgaaattatactttttctaaataatgttttaatctctgatttgaaattgattgtagggaatggaaaagatgggataatttttcataaatgaaaaatgaaattcttttttttttttttttttttttgagacggagtcttgctctgttgcccaggctggagtgcaatggcgtgatcttggctcacagcaagctctgcctcctggattcacgccattctcctgcctcagcctcagaggtagctgggactacaggtgcctgccaccacgcctgtctaattttttgtatttttttgtaaagacagggtttcactgtgttagccaggatggtctcaatctcctgaccccgtgatccacccgcctcggccttccaagagaaatgaaatttttttaatgcacaaagatctggggtaatgtgtaccacattgaaccttggggagtatggcttcaaacttgtcactttatacgttagtctcctacggacatgttctattgtattttagtcagaacatttaaaattattttattttattttattttttttttttttttgagacggagtctcgctctgtcacccaggctggagtacagtggcgcagtctcggctcactgcaagctccgcctcccgggttcacgccattctcctgcctcagcctctccgagtagctgggactacaggcgcccgccaccacgcccggctaatttttttttatttttagtagagacggggtttcaccgtggtctcgatctcctgacctcgtgatccacccgcctcggcctcccaaagtgctgggattacaagcgtgagccaccgcgcccggcctaaaattatttttaaaagtaagctcttgtgccctgctaaaattatgatgtgatattgtaggcacttgtatttttagtaaattaatatagaagaaacaactgacttaaaggtgtatgtttttaaatgtatcatctgtgtgtgcccccattaatattcttatttaaaagttaaggccagacatggtggcttacaactgtaatcccaacagtttgtgaggccgaggcaggcagatcacttgaggtcaggagtttgagaccagcctggccaacatgatgaaaccttgtctctactaaaaataccaaaaaaaatttagccaggcatggtggcacatgcctgtaatccgagctacttgggaggctgtggcaggaaaattgctttaatctgggaggcagaggttgcagtgagttgagattgtgccactgcactccacccttggtgacagagtgagattccatctcaaaaaaagaaaaaggcctggcacggtggctcacacctataatcccagtactttgggaggtagaggcaggtggatcacttgaggttaggagttcaggaccagcctggccaacatggtgactactccatttctactaaatacacaaaacttagcccagtggcgggcagttgtaatcccagctacttgagaggttgaggcaggagaatcacttgaacctgggaggcagaggttgcagtgagccgagatcacaccgctgcactctagcctggccaacagagtgagaatttgcggagggaaaaaaaagtcacgcttcagttgttgtagtataaccttggtatattgtatgtatcatgaattcctcattttaatgaccaaaaagtaataaatcaacagcttgtaatttgttttgagatcagttatctgactgtaacactgtaggcttttgtgttttttaaattatgaaatatttgaaaaaaatacataatgtatatataaagtattggtataatttatgttctaaataactttcttgagaaataattcacatggtgtgcagtttacctttgaaagtatacaagttggctgggcacaatggctcacgcctgtaatcccagcactttgggaggccagggcaggtggatcacgaggtcaggagatcgagaccatcctggctaacatggtgaaaccccgtctctactaaaagtacaaaaacaaattagccgggcatgttggcgggcaccttttgtcccagctgctcgggaggctgaggcaggagagtggcgtgaacccaggaggtggagcttgcagtgagccgagattgtgccagtgcactccagcctgggcgacagagcgagactctgtctcaaaaaataaaataaaaaagaaagtatacaagtcagtggttttggttttcagttatgcaaccatcactacaatttaagaacattttcatcaccccaaaaagaaaccctgttaccttcattttccccagccctaggcagtcagtacactttctgtctctatgaatttgtctattttagatattatatataaacggaattatacgatatgtggtcttttgtgtctggcttctttcacttagcatgctattttcaagattcatccatgctgtagaatgcaccagtactgcattccttcttattgctgaatattctgttgtttggttatatcacattttatccattcatcagttcatggacatttaggttgtttttatttttgggctataatgaataatgttgctatgaacattcgtttgtgttctttttgtttttttggttttttgggttttttttgttttgtttttgtttttgagacagtcttgctctgtctcctaagctggagtgcagtggcatgatcttggcttactgcaagctctgcctcccgggttcacaccattctcctgcctcagcccgacaagtagctgggactacaggcgtgtgccaccatgcacggctaattttttgtatttttagtagagatggggtttcaccgtgttagccaggatggtctcgatctcctgacctcgtgatctgcctgcctaggcctcccaaagtgctgggattacaggcgtgagccactgcacctggccttaagtgtttttaatacgtcattgccttaagctaacaattcttaacctttgttctactgaagccacgtggttgagataggctctgagtctagcttttaacctctatctttttgtcttagaaatctaagcagaatgcaaatgactaagaataatgttgttgaaataacataaaataggttataactttgatactcattagtaacaaatctttcaatacatcttacggtctgttaggtgtagattagtaatgaagtgggaagccactgcaagctagtatacatgtagggaaagatagaaagcattgaagccagaagagagacagaggacatttgggctagatctgacaagaaaaacaaatgttttagtattaatttttgactttaaattttttttttatttagtgaatactggtgtttaatggtctcattttaataagtatgacacaggtagtttaaggtcatatattttatttgatgaaaataaggtataggccgggcacggtggctcacacctgtaatcccagcactttgggaggccgaggcaggcggatcacctgaggtcgggagttagagactagcctcaacatggagaaaccccgtctctactaaaaaaaatacaaaattaggcgggcgtggtggtgcatgcctgtaatcccagctactcaggaggctgaggcaggagaattgcttgaacctgggaggtggaggttgcggtgagccgagatcacctcattgcactccagcctgggcaacaagagcaaaactccatctcaaaaaaaaaaaaataaggtataagcgggctcaggaacatcattggacatactgaaagaagaaaaatcagctgggcgcagtggctcacgccggtaatcccaacactttgggaggccaaggcaggcgaatcacctgaagtcgggagttccagatcagcctgaccaacatggagaaaccctgtctctactaaaaatacaaaactagccgggcatggtggcgcatgcctgtaatcccagctacttgggaggctgaggcaggagaattgcttgaaccgagaaggcggaggttgcggtgagccaagattgcaccattgcactccagcctgggcaacaagagcgaaactccgtctcaaaaaaaaaaggaagaaaaatatttttttaaattaattagtttatttattttttaagatggagttttgccctgtcacccaggctggggtgcaatggtgcaatctcggctcactgcaacctccgcctcctgggttcaagtgattctcctgcctcagcttcccgagtagctgtgattacagccatatgccaccacgcccagccagttttgtgttttgttttgttttttgttttttttttttgagagggtgtcttgctctgtcccccaagctggagtgcagcggcgcgatcttggctcactgcaagctctgcctcccaggttcacaccattctcttgcctcagcctcccgagtagctgggactacaggtgcccgccaccacacccggctaatttttttgtgtttttagtagagatggggtttcactgtgttagccaggatggtctcgatctcctgaccttttgatccacccgcctcagcctccccaagtgctgggattataggcgtgagccactgtgcccggcctagtcttgtatttttagtagagtcgggatttctccatgttggtcaggctgttctccaaatccgacctcaggtgatccgcccgccttggcctccaaaagtgcaaggcaaggcattacaggcatgagccactgtgaccggcaatgtttttaaattttttacatttaaattttattttttagagaccaggtctcactctattgctcaggctggagtgcaagggcacattcacagctcactgcagccttgacctccagggctcaagcagtcctctcacctcagtttcccgagtagctgggactacagtgataatgccactgcacctggctaatttttatttttatttatttatttttttttgagacagagtcttgctctgtcacccaggctggagtgcagtggtgtaaatctcagctcactgcagcctccgcctcctgggttcaagtgattctcctgcctcaacctcccaagtagctgggattagaggtccccaccaccatgcctggctaattttttgtactttcagtagaaacggggttttgccatgttggccaggctgttctcgaactcctgagctcaggtgatccaactgtctcggcctcccaaagtgctgggattacaggcgtgagccactgtgcctagcctgagccaccacgccggcctaatttttaaattttttgtagagacagggtctcattatgttgcccagggtggtgtcaagctccaggtctcaagtgatccccctacctccgcctcccaaagttgtgggattgtaggcatgagccactgcaagaaaaccttaactgcagcctaataattgttttctttgggataacttttaaagtacattaaaagactatcaacttaatttctgatcatattttgttgaataaaataagtaaaatgtcttgtgaaacaaaatgctttttaacatccatataaagctatctatatatagctatctatatctatatagctattttttttaacttcctttattttccttacagggttttagacaaaatcaaaaagaaggaaggtgctcacattccttaaattaaggagtaagtctgccagcattatgaaagtgaatcttacttttgtaaaactttatggtttgtggaaaacaaatgtttttgaacatttaaaaagttcagatgttagaaagttgaaaggttaatgtaaaacaatcaatattaaagaattttgatgccaaaactattagataaaaggttaatctacatccctactagaattctcatacttaactggttggttgtgtggaagaaacatactttcacaataaagagctttaggatatgatgccattttatatcactagtaggcagaccagcagacttttttttattgtgatatgggataacctaggcatactgcactgtacactctgacatatgaagtgctctagtcaagtttaactggtgtccacagaggacatggtttaactggaattcgtcaagcctctggttctaatttctcatttgcaggaaatgctggcatagagcagcactaaatgacaccactaaagaaacgatcagacagatctggaatgtgaagcgttatagaagataactggcctcatttcttcaaaatatcaagtgttgggaaagaaaaaaggaagtggaatgggtaactcttcttgattaaaagttatgtaataaccaaatgcaatgtgaaatattttactggactctattttgaaaaaccatctgtaaaagactgaggtgggggtgggaggccagcacggtggtgaggcagttgagaaaatttgaatgtggattagattttgaatgatattggataattattggtaattttatgagctgtgagaagggtgttgtagtttataaaagactgtcttaatttgcatacttaagcatttaggaatgaagtgttagagtgtcttaaaatgtttcaaatggtttaacaaaatgtatgtgaggcgtatgtggcaaaatgttacagaatctaactggtggacatggctgttcattgtactgtttttttctatcttctatatgtttaaaagtatataataaaaatatttaatttttttttaaa

SEQ ID NO: 2 - DNA, 170000 bp, Homo sapiens
ttttcattatgaaaagtctgtctacagttttctcttcacatctatctgactacaatatagttataaacccatctgtttcccaagtaacattctcttctaaaagtaggataatttttttccatagaaagctcagatataaaatgaggagactttttgctctttaggaatacaaatcagcttagactaaccaatcacactgaatttttaaagattttaccagtaaccaaaactatatattaatggaaaatggatatgggggaaatacatcctttgtcttaaaaacagaaccccaactttatttaggggtggcaatgggctcagctaaaaacacagtgattccacattcccttgcaggagggagcagccatttttcacagttatgacccataggctataagttaaaatctctagggggtttgggaaagctcttggaggaacctgatttagctggcatgtgtcttatgccttttggtcttcctatccttctccctagcatgtagttaggatgctggaagtgaggcagccatctcaagaccatgaagcaacaaatagaaggatgaaagtcacaagctgaggatgtttgagaggaagaaaaatgagcttaggcctctgaagactgtgaagtcctaccttcagactaatgtcacttaagaaaaacgaacttctattttggttaagttagtatatgtttgattatctcttacaagcagccaaacctataccaagttgatccaattagaagaatgtgccaaaaaaatcttttaaccgtttccaaacgtgcatttcagaagcattcatttactttggcaattattaaactgatatatattagtaaaacatttttatacacttcttaaaatgactcctccaaataactctactaggccatactctatgcacttcctatacagggagggacacattatgaatacttttcatccctccattgattcattcagcaaacacttattggaggcccagaaagcattgtgctaggggcagggatgcaagaatgaaaaacacacacctgattacaaaaggcttagtttatttgaaaagaataagacagaatattttttaaaaacattctattttccagttctttgcttcctgagggttgtttgtttcacatacattagctctccaagggatagagaagcctagcaccataatcaacatcaataaaataaaaggatctgagccaacaaattggtgtacatagcttaatgttcagaacacaaattcatcattgaatatttaattaaatgttgcaccaatgtgttcattactgttgtgagaaataactgaagaaagtttctcattccaatcagtacagaacttgtttttccaaaatcagactactgctaaaagcagatatttagtactactccactttttttttctgtcatttgtatgatataaaaaaatcactgtacatcaagcctttactccagtatcaaaagacaattattcattgcagtatagctgacaaaataacaagttagtgtcaggaaaaccatttttcactcacctcttcctctatgtcaggcatatcatctaacttctttctacctcagtttccttatgagttaagtaatgggttggaattagatcactgtgttccctcatagatctaaattctcttatttcctcactctacttagtgtgatgcattagcagataggtttcccagctaagagcagaacattaagattatttttaaatgatgtgtggttccttctctatttctgttacctcaggaattatacatattagccaacaactcatatcaaaccacaattttatatataattaaacaatataatgtcatcttttattaataatactatatcaccatactcaaaatcagaatagaagactggttttattatttctagcttttaaaagcataacttgcattgcacacatttgggataattgaaagaaaattagatggagtgtacattgttttaaatttgctgttcacattatcccccagatatctaggagtaagtctaacacagattatctcaaaagcacagcaatcctcttgctccattataagaaattattttcagagtctaaaagattgattatatgcaaaatctgaaagctaaaattaagatcttatttttcagtatagacaatagaagtaattaattaacacatctgacatttatcggcaacccaccataggcagagatctgctttcttattagttgcataagattttcagaagttgaaatacattaaatacaaccagtttaacccaccacgttctgaatttgatatcctattaccttgctcacaaacaagatctttaaggaacataaacactctttacaaatcctttagttaccatcctgcaaaacaactcacacccccaataataatctcattacatatatacatatttccctctactcaccacaatgagttaaaggtggacaaaagccctcggtgactgtctttgagttattactttgctttaccatttccttccttttaggtgtcatggtacaggactttactgatagcaattcattcttgttaggtttactgcaaacaccaaaagaggtgtcttgcacttgctggaagacttagcttttatgcttctggtcattcttcccacaaaaagaatgagaccagtttctgagctattcttaactcgccttccaaaatatttcaaaagaggaagacaagaaagacttcatgatttccatgcaaactcccagcctgcctggctgcctgctgctgccaatacttcttgctcttgctggtgatgacattcagagagctccccagcactggtgcttcgttatgtaaggctgtctaggtcaagtgtaggagacacactgctggcctgtggaaactcatggaactgttcctccagattaacacttcaggggttatggaagctggaggaagctgagcttttactacatcttttgggggtaaatatttttgcatgtttcagcagtttatgtactacagtcttggcagatgcctgtcagtcatgctgagaggtgcagggagaaattactgagattacagttctgtcagcatgcttgaataagcatagtaagtcttccagtaatcctggctttgagacacttaaggagtaaataaatcataaattcaaatttgcttatcggacatcatctgtaaccatcaaggaatgaatgttgatttgatatttaaactctgaatacaatttatttgattggaggtgttgtaggagagcattattagaggtggctattagctcaaagagatttactgcagttcttggctgttacgttgcccttgtctctggctgcaaatttgcttcccttgtaagtgagttatatatatgcctgtatttgtcttctgttgtgattgtttgtgatcgtataagaataaactggcagttaggtgacttcaacaaataatgaatcctgcctacttagtttcaaggtgaatactgcagcaaaagcgccattcgacactagcactgaaggagggtggattaactgcattggctcaaactgtgctgtgtttaggagacttgaagggatgattccaggtttgatatgaacagttgttcactctatgggtaaaagtagaaacaatatagcgctgattctgttttagactctcacactgtgtcctgcctcagcaattagttaaaatagcaggctctttattgaatgctgcagaaaagcctagagaggtagcagggtaagattgccgcagcagagtgatatattggccaggaattttaataagatttaaccagatatgataatacaacagatggcatctaatctaaaaaatagatggatatttaaaaagttgaagacaaatgtagcacatttgagagggtttatcttcctgtgtgtccttggcaagtgaagttcagtaccttggacaggatgacatgagttaggaaagtaaagtctgcataaactgtctacgtgatctcaaagagcaaaatggaaagttaactatcaatcatttgttttggtgtctctcagtgatgactggcattaggcaggttacttagcacatactttctaggtaaacaggtagttttaaagtatctaaaatttcttgcattttaaaaattaaattaaaggaatgaaaatgagtgatcgtaaaataaattcccctgaaggtacttttcattctattaaccatattaacagcagcacattgattatttatgatgaaaatataccacttacaattgtatgctgtatttagttgattaaacatgtacatgatttcccaaataatttaaagagacaattatggtccctcggggcctgattttatattactgaagtcaataggcattttccctagacatagcttgagataagagccccatcagaccaggttttactcagtttggcattcagactattcctcataagttaaaaaatgatggatacatacttaattgtacttataatctttgagtttatatatctttcagataacaatgtcagtgttcaaattgtctataattgatttgcatttaatattgtttcttttggctattgctaaaagggattcttctttgttgtaataagcttaaaatatattaattttttcattttaaaatggggaatttgaattaaatgaggtttaaattagttttgattctaccatatatatctttgtattcctctaaatgggaattaacattattaactaatctatgttaaagtgagattacattttttggtgagattatattgtttgaatatttacaatattaagccaaaatttactaagtacctactaaattctaggacagtggttttcaaagtggggtctcctaaccagcaacatcagtactacctgggaacttgctaggaatgcatgttttcgggcctcatgacagacttactgagtcagaagctctagggatgggtcctggcaatctgtgtttgtgtaagcctttcctccaggtgactgtgaggcatgctgaagtctgagaaccactgtgctgggaagtaatttggttaaatattataaaaatggtttttactgtatatagttaaatacatattgtcattaaattttctatgttcatctttgcctagatatcctactgtaagcagtactatgttttaaagatttatgcaattattgagtataccttaagtctaaatatgtccataagaaggtctattttccaacagttccattttagaactttagctcttagaagttaaatactgtaatgggaaaaatactagaggacttatctgtttgttcactgtgtgatttggcacatatcactgaccctctttgatgttcagcttctcatttattaagatgagaggttggcttacatcagggtttctcaactcagtactattgacatttgggtcagatattcttcgctgtggggtctgtcccagacattgtggaattttgagcagggtccttgcctctacccacaaagtgtccatagaaaccctcagttgtgatgaccaaagatatttccagacattgatacctgtctaccaaaggcaaaactgacctcctcctcatttgagaaccactgacctagattagctccgctatgaaaagttccatcataataaataatacaacaaatatatcatttatccttttggaagtaggtaggttaaaacttataaataaatgaagacatgttttacttgtataactcaggtataaggtgggacctgtttgcacccttgaagatctaggtgacgatctattggtagatatctgttggcagatatcttgctcaggtatctaccaataccacagtcagtggaagtccaaaaccttctgcaacttatcagggacttagtcttacatcatcctctgtgtcctggcatcgtggtttcatgtatactacacctaaccactctgtcaagtgacccagtgtctgtctgtccctagtttttaacagagacttacctacaccaatcaccttttcaatttaataaattttattaaagatgtgggcttctacccgcattttctcccttccccatcccatctctgctcctcatcccctccctgagagatctgaacactccaaatttttctcttcttagtatggaaagtagtccatctctccacagctcttatatccagacgtagatgcccaaactcatcaaagagtttagaagataaagggccttcaatttagaaccattcaccatacatagaaggcagttggggtcatatggtataatcataaagttataaaatcataggctgttggaaggaatattgaatttaagttcattttcatgtctttagccttaaaattacaaatgttacaagctagagtctcagaattttaaattataccttcccatgaatttttacctaaaccacttggcaatttagtacagacattttctcgacctgatatgtgcgatagaagtagacaagcctcacacacatgcatgtgcgcctacacacacacacacacacaaatttttctccaacagttaaagattcttttcaatatactattctacaattcaaattaggtgctattctgagatatatgtggattaaggaacctaatataagatataggtagctatatttctgttaaaataataatacctcatacttgaatgactatatatgtattttcaagtaattttaaaaacatgatccctgccgggagtggtggctcatgcctgtaatcccagcacttggggaggccgaagcgggcagatcacgaggtcaggagatcgagaccaggtggctaacacagtgaaatcctgagatcgcaccactgcactccagcctggacgacagagcgagactctgtcccccacaaaaaaaaaaaaaaaaaaaaaaaaaaaaaaattacttaggccaggtgcagtggctcacgcctgtaatcccaacactttgggagaccaaggctggcagatcatgaggtcaggagtttgagaccagcctgaccaacatggtgaaaccccatctctactaaaaaatacaaaaattagctaggcatggtggtgcgctactcagaaggcagaggcaggagaatcgcttgaacccgggaggcggaggttgcagcgagccgagatcacgccactgcactctagcctgggcgacagagtgagactctgtctcaaaaaaaaaaaaaaaaccatgatcctttctgagacccatagcaactctaaaagataggccccattatctctgtcattttgcagtgagaaaataaaggctcaaggtctccaaatgccaaattcacttctcgttccactatcctacaaagcaaaactcaatagttcatgtagtttgaacacattggtaagtataatttctaagtgattttttataaagacctgtctcaagagtcttcctgctctaagaccttcagagagattaccagtgctttgttttattcctaggattaatgcattttacctgacttatcatacatttattcgtatcatatgcttaattaattttccggtatatgtattatagaatgattttaatacatcatttattatactagtcatagtcacatgtgttctatcacttagtgccctcaaaaaactccatgggaataggattattacccccttaagagggaataattcaaacatgagattgaattaaatttccctatacttgagctttaccagaggtaccacactgatgacccagccaacttctctgttttcaccaacgaaaatgcagaacatagcaacagaccatctcttttcactggcaccctccagtgcttgacatatagagagtgtcagtaacttttattgaagaaatactgaaatattgttattgctatgtagttcctttacattttggactttacctaacattaaccaccctagttaattaagtagcaacttgcaaatgaggcctggaagaaccaaaaaacaaattttaaaaagaactgtctgcaactcggaactgctaatgctactttctttgtttcactttatttcacttgagaaaatctctttgggtttgatacggagatgttctcagactttgaatgtgaaaaattgttcccaagatcaaatataaattcctcctttaaaatacaatgtcacaaacctggatcacaaagtcacttccctctttagtcttaaagtgaatactcaagatgaacgtgaatgatcttttattccaatttccaatttagaatattatttcagaaaataattattcaaagttttttgagaaacctccacataaagccaaacaaatttttaccaaagtaaggtaaattctttgtcaactgagagcctgaattagatgattcctcagacttttttctaattataatattctaggtaaaggagtttagctcggcaatatgaccatccaaatatcaaccaaatccaagatgattagatttaatagcgccattttggagatgcattgattattgaagataagtaaaggtctcaacatttttgttttcctcatttaccccaaaatacatccttagtcacacatgtcttaggatctggaatttgtttgataaaaatgctgagttctggccaggcgcagtggctcatgcctgtaatcccagcactttgggaggctgaggtgggcagatcatgaggtcaggagatcgagaccatcctggctaacacagtgaaaccccgtctctattaaaaatacaaaaaattagccgggcgtggtggcaggcgcctgtagtcccagctactcgggaggctgaggcaggagaatggcttgaacccgggaggcggagcttgcagtgagccgagatcctgccaccgcactccagcctgggcgacagagcgaaactccatctcaaaaaaaaaaaaaaaaatgctgagttctgaaaaaataaatctttcttgttttgtttcaaatgaaattatagctctctgataaagtggcattcctttttctgttttatattcaacgagtgtattagtccgtttttgtgctggtaataaagacatacccaagattgggtaatttataaaggaaagaggtttaatggactcacagttccacatgactgggaaggcctcataatcatggcagaagacaaaggaaaagaaaagacacgccttacatggctgcaggcaagagagcttgtgcaggagaactcccatttataaaaccaacagatctcatgaggcttattcacttactagaacagtatgggggaaactgcccccgtgattcaagtatctccacctggcctcacccttgacacatggggattattataattcaaggtgagatttgggtggggacacggccaaaccatatcagcaagtgaaacagtgaaattggatttctaaaagttgtcagtgttctgttggaattattttattcagagaggtaaggaaagtacaacaggtgtcaaccttccatatgaaatttcctaaagaatattattgttacctcatgctgggagaagggaaagtagcagtgatagagtgttttgatttcaaatgtacagcttctagtaaaagcattataattaactttatagtagtaagcacaaccaggaatataaaaatataaaagttttgggtttggcctccagatttaccaaatgttgcttcctaacaattagccaaccctcccacactgacacttactttgtctaaattgagttttaggagaaaacaacccaattataaagacacaactattatcagtcaatgccctgacaagaaacagatggctcctccaaacttgtggaaataaaaagcaaactatttggttttatcttctcaacacgatattttcatggattccttgggaatgcggttccagttttccctctttagcaggtgtgccaggcccttctgatctggctgtctgcctacctctccagactctagccacttccacagacccaactttacatatatcctacatgtatctcctcttcttagaatgcacctcctctttctcctccaccctctttgtgtctactcataaatgcctcagagaaattcctagataagtttaagacagtctagattctacttcccagtcaacaaagaaaaaagtttgataatttctggtgatggaaacagtttcttatgctgttctggaatataaaatggtgccacacctttggagggaaatctattgatacctactgggttaaaaggcacatacccttccacctgacagatccatttcctgagactagatcttaaaggaaaatttgcacaagtgggaaatgcaattgtaaagaaatgtatacatccgcattgtttgaaatagaaaaaaaaaaaagaaaaggaagaaagaaagaaaataacataagtgtttatcatctgagaactgattaaataaactttggtatatccatctatatacagaacaaaatattttaagcaataataagtgaactaattagagataaattatgtaacttaaactaggtttacagccatatatattgtgtgatgtttttctttctttttaaaaaaatatttgtggagatgggttctcagtatgttgcccaggctggtcttgaactcctggccccaagcaatcctcccacctcagcctcccaaattgttgggattacaagtgtgaaacaccatgcctggtgtctggtacaatgttatttataaaaaaaagaaaaatataaaacacgtatatttcagatgcttggatatacacaagaattctaaagaagataaaaaaaaaaaaattaacagcgattgccactgcagactgggcctgagggaagagaaactggaaagttaatttttacttcaagagccactcaagtcaattgacattagaaatgtgacttagaagagtagattgggtttgcttggtgtatctaaatagtatgtacaagcagggctgcaaaggggaatgggaacacccggggagtggtgagcagggcagaatggctgatttacatgttcaaggtgcagaaggaagtgagtaggctttaagagctgaggccagatgtgacagccagggcttctcaaacaccaatgtgcacagaatcacctggggaaatcttgttaaaatgcactttcttatttagaaggtctgggtggagccaaagagtccacattttcaacaagctcccaagaagtggggatgctgccagtatgtggccacactttcagaagcaaggttttaaaattctgaaagtatcctggttttgcgcggtccgtgtcttcacaaacatcaagcagagccgaaaagcacttgtttttagaaaatgagctgagaaaaaaacacctaattaaatacgatgtttgcaacatgaagcttccaccaaaggaagcttactgttaagtgttcacgatcagcagttctgctttgctagctttttcatttctaacaaatttagacttctggagattgaagctttgccagattgaggcatgcttctcccctcactactcatgtgtttagtgtatttgttaacttggtgagagtacgtccaaacatagttatattctttcacttgctatggaagattgaagaatctgagacaagtaagaaggaagatctccatttgcctccctcccaccctgccacatgctgccccctaacatgtttgacaagaatccaggctacagactgatcatacacctaaaaactatcttcggtcagctacttgtagaaatgtctctcccccattatgtccttatatgagcttaatgtgatgtaatccttagcagtaaagaaagactattgtcttctgtttgtttgcctgtgaactcgaattgcagagactttccaccataattttaataatgtgatattgtggagagttttagtatggccttatggtaagattaggtactttggagatacactgctggtttcagaatcacacttagtcacctcgttactgtgtgatcttggccaagatgctcaactactctgagcctcagttgcctcatttataaattcatgaagataacatggtaatagcaactattttatgagactgttgtgaggtttgaaggtcccaaaatatattaagtcctcaataaaattaacaacaattattattattctaaaattattcttagaatttatctaaaaatagtactgcttgaatatccatatgtttattcctgagtctctacctgctatgatttggctgtgccccactcaaatctcatcttgaattgtagctcccataattcccatgtgttgtgggagggacctggtgagagataactgaatcgtgggagcagttttccccatactgttcttgtggtggtgtataagtctcacgagatggttttataaggggtttcccctttcacttggctctcattctctcttgcctgctgccatgtaagatgtgcctttcatcttctgccatgattacccagtctcaggtatgtctttatcagcagcatgaaaatgaactaatacactgggcaatttacaaaagaaaaacaagtttcttgaactcatagttccacgtggctggggaggcctcacaatcatgctggaggcaaggagtagcaagtcacatctcacatggatggcagcaggcaaaaagagagtttttgcaggcaaactcccatttttaaagccatcagatcttgtgagacttattcactatcatgagaacagcacaggaaaaacccacccacatgattcaattacctcccactgggttcctcccatgacacatgggaatggtgggagttacaattcaagatgagatttcagtggggacacagccaaaccatatcattccactcctggcccctcccaaatctcatgtcctcacatttcaaaaccaatcttgccttcccaacagtcctccaaagtcttaactcatttcagcattaactgaaaagtccacaatccaaagtctcaaggcaagtcccttctgcctatgaggctataaaatcaatagcaagttagttacctcctagatacaatgggagtacaggcattgggcaaatacagccattcaaaatgggagaaattggccaaaacagaggaactacagaccctgtgcaagtctgaaatccagcagggcagtcaaatctttaagctccaaaatgatctttgattccatgtctcacatccaagtcacgttgatgcaagaggtgggttcccatggtcttgggaagctccacacctgttgctttgcagggtacagactccctcctagttgctttcacaggctggcattaagtgtggcttttccaggaacacagtgcaagctgtcagtggatctaccattctggggtctggaggatggtgaccctcttctcatagctccaccaagtggtacactagtagggaatctgtgtgggggctctgaccccacatttcccttccatactgccttaacagaggttctccatgagggccccacccctgcagcaaacttttgctgggcatccaggcgtttccatacatcttctgaaatctaggcagaggttctcaaaccccagtttttgacttctgtgcacttgccggctcaacaccacgtgggagctgccaaggcttgaggcttgcaccctctgaagctatgacccatgcactatgttggcccctttcagccatagctggaatggctgaggcaaagggcacaaagtccctaggctgcatacagcatgggaactctgggcctggcccatgaaaccacattttcatcctaggcctccaggcttgtgatgggaggagctgctatgaaggcctctgaatgccctggagacattttcttcattgtcttggggattaacattcagatcctcattgcttatgcaaatttctgcagctagcttgactttctcctcagaaaatgggattttcttttctattgcattgtcaggctgcaaattttccaaacttttatgctctgtttcccttttaaaattgaatgcctttaatagcacccaagtcaccccttgaatgctttgccacttagaaatttcttccaccacataccctaaatcatctctcccaagttcaaagttccacaaatgtctagggcagggacaaaatgccaccagtctctttgctaaaatataacaagagtcacctttgctccagttcccaacaagttattcatctccatctgagatcacctcagcctggatttcgttgttcatatcattatcagcattttggtcaaagccattcaacaagtctctagggagttccaaactttcccacattttcctttcttcttctgagccctccaaattgttccaacctctgcctgttacccagttccaaagtggcttccacatttttgggaatctttttagcagtgccccactcccagtaccaatttactgagtagtccattttcaagctgctgataatgacatacctgagacatgacaatttacaaaagaaagaggtttattgaacttacagttccaaatggctggggaggcttcacaatcatggcagaaggcaacgaggagcaagtcacatctcacatggatggcagcaggcaaaaagagagctgtgtcagcaaaatcccatttttaaagccatcatatctgatgagacttatgcactatcatgagaacaacacaggaaagactcgccaccatgattcaattacctcccaccaggttcctcctactacatatgggaattgtgggagttacaattcaagatgagatttgagtggggacacagccaaaccatatcatacactaccatatactaggcactgtattaagggttagggtattaaatagaatcttttatcataaagatttttgttcatctctgtaaaatattttagacacatgtgttttgctttttaaacaaagaaaaagagatgtttttagagataagatgagacacattgttattttccccagttcccaccagcccttcacaactgccaacctggaaaaaacattcccagagcccaacaaatgctggagccctggaagaagggctactagcaggagcactggactccaaggaatgcagaccagggaagagagtgttgggagtattaaaatgtaggttagaagtggaataatggacaagtagagggaaagactttcaagtccactttccagggattgagaaacttggggtccttcatccgttggctttgaatgcagcccaagacaggcattagcagaaaattggagagtctccccgaccacacctcacttcctagcttaaaaaagcagctgcattcctctttagttaaacctctcagttgggtcttctaaagctctagctctcaccggaatctggtgccactttcactcttgcctggaatggcattggctctctctattgctagttcctgggcactcatcaaccatcttaacccacttggtcaatagtttctccataattatttttattttaaccattttgaatgtaccatctactttctgctaggaccatgactgcatctgaggtataattttaaagcaacaaatggttcatggaagggtaactctgtttgtgatgcccaagagaggagacttagggcagatagagatacatataaagctactgctgtcctagagagcagagggacaagaaaaggggagagagaacactcattagcagttgtgtgtgtgtagcataacataacatatatatatatgcatatatatgatatgtaatcttagaaacaactaccatgtgaagtagagcaaatgatcgctgagtttcatccttgctaagagcatgggaaaatccacattctatgtttgcttagttgcagaaagaataagggaagcagaaacgtcaggggtcacatcccctatgtgtcaattaaaggggtgcagactcagaaggtgtccttacctactttatttagcctgctcttccccacaaagatgaggaatacaggtgactttgatgtcatgatagcaatcagaatgtaaaagagactttcaaaaagacctagtgcaacatggaaacaaggactttagtctctgagcttccttatgtatcaagtgtcatagaaaatgttgagacaaagtggttctgtcatttcaacaacccataatgagcagaagaatctgtttgcctttcatgccactgcagatgaacaggtatgagagactgcacttaggcatgaaagtgccgctgcctagcacctctatcccatgctcacatccgaatcttctcaggtgtgggtaagacatctcagttctctgctatttgatatgaataggggcaatcccagaagcagcaactgagctcatgggccccaaaatttccaaggaatcacgaggagaactaggctaaatgtcattattttctgaccttcgatgtaccttttccctagtcacttgccaatctcttctaaagggcctcagtccctggagtggaccctaatgatttctgtccattatttggcctagagtagaattcttgcttttctcaaggaaagaaacaaaaagaaaagatgtaaccaaatgtaatttatgtgagtttgtaaattgatatccgaagattggaactgcatacagatgtgtcaaaaatgttaatttccccaagaaatatggtagcacctaattctagcgacacttgtatactttacagatggctttgctgtgctcctggtaaagtcaatgactttctgcctttgaacatgaaaggaaaaagatgttgacaggaattctttagggaaacagaaactacatatttgcttatgctaagttatggcaaagttcagttttattctgtaaataaagcgttgtcttcataaatatcagctatatcctttagagtaaagaaagtcctctttattaaaaaaatctaattgaaactcttcaataggtaggcaagtgaggtgattgatataaagatatacttaagtggaaaattggtattcgagttccaataagtaatcaatcatattgttcttggtaatagcttttgttgattcatctttgcaagggatgtcggggggtaggggggattgctgaatgaaataaatcaggaaagaacccaagcattatgtttaactgacttaagagcaaaggaaagaacacataaacacagaatagaatccacacagtaacttcattctttatgattgctcaggcattttcattatttgcatttatgtttattttctctttatcctcctgtggcaatagatatggagataatgctttaaatattgtgatgtaccttgatcttttctgaagaaccaaagctttatgaaatcttgatacatttaaaggaggggtataaagctcaggcatgtgaaatgttgaattttgtctccccatatgacagataaccatcatataaatgtggtttattagactaaaaaagtagaacacatatttttagattacatcttggcatttcaaagaaagtatagaacttcaagatagtttgcttcctggatattttctggagctgtctttgggcctgcattcctgaaagctgtcaatgctacactctgcatacccagagctcgtgcccttgggcttgagtactttgtggttaatatttaagaaccgcatgtggagctagattgaaggacagtcactttctttattctttgctaaaaccaatgttggttagtccatcaccttcttaaacagtaactgcattcatacccttcatcacatccatctctctgtcaaaacatgagtgaaaatcaattgtggcatatctagaaatacttcactcacttccattttgcttcttatgtgctgatgtaccttactcaatattaatttcctttagagttaaactgtgggaaaacttgaatggacctttgtggtataaaactatctatgtgaccttggacaagtcactgcacctctcttggcatcagtttcctcatatccaaaataagaacacttgcctggtttatctctgagacttttccagctccacaatttctcaatgattagcaaaaccctatcgataaagcaatggtaatgatttatgtaaattgacattcttttttatgaggtttacaaagttattttattctactccagggttttgttggaagtctattacggaatttttattcatcaatactcagcagatgttatcaggttctctccagaaactaccttaattctaccacagacttgggatatgtttggggaacaatgacaaaaaaaataagtcatagttcttactttcaaagagattattgagtggggtcagaccgtggagaggtgcaccgatagagggtggaggaagatgcggtcaaagaagagaaggtcctgaaaacagaggaaacaaaggaagcggaacagtgaaggcataatggctccctgcttgtttaggaaaaggcagagtttgttgttttgaaaaacgacatttagtgtcatcttcactaaatattaataatgtcttcttacacgttagctaaagaagaaaagatcaaaaataaaccaggcccccaaataataaaggatttaaaattaaagatatatacagagcactatagtaatttttgaagtgctgttcagttggtgatataatcagaggaataatgctattacatcaagtgataaaaagtaattttgtgatttaatactcattctgaacctatattgtaatgctaatctcatcagatgattgacattcatatacttaatttccctttgagaaatcaggttcatgtattattctgtcttgtttataaaagctacttatttggtttaggaatattgttatttccctctccaacaccaatgtctgcctatgtaattgaaaggaaattgcagtgaatcttccaacaaggagtaactgcttccctgaaataatcacctgcagacataattctggcttctgtgcgttgtctcgatagcagggaaggcagagggcaactggggaatctgattatctccatcataatcccacaacttccctcctttctcttttgcttttaattactgcattgtggtgagttaagaaaagcctatactattttttcttctccactaccagaaagagagagagataactggcattctctctctaaggatttttaaaatacttttaataaaattttaaatagtgtaatgtgtgcccacaagcacattggttctaaagatacttcaaaaatacttcagaatcaaatctgtaagaaaaaaaaattcaattatttatgttcattatattacaagtgatttaaaaactggttatctgtgcatcaaaaaatgcaagcctatagcagctctgattcagtgaattccagttgcggggaggggaggagccctcagatatttttatatcatatttgaaaaaaatggctgattattatttttttaatttatggaatgtatggactttaccagagtttcaaaagtccactttagtacctataagatattttgaaatcagttggccaattcttgccatcaaaaaattgtaactttaaacttgcagaaaaactagttggctctagtcctaaaagagagttcttaattgcagtttctgcatttatttgtctaatagcaaataaatttcacattcatttctgactccctttcaaaagggcaggttaatctcaaaaggaaatatatgagtttatcattttcggctaggatatggtttctatttctaaaatagtggcacagtgttggtgaatgctttgtgagagcaaggaattggtagtagatttttgcagaatgctgcatttaccaaaagaaaaaaaaaaaccactaggaaattgacatctacaaaagcaaagtacttaagtagtaaattacatttaccaaggatcacatcagtagtgtgctttatctgattattccaatcaaaagggggcaaagtcaggatttgtagtgatacagtggtcctgtagatctaaaatcttaaggtctgagtttaaatccaaactctagcatttgctatctgtgttgggatcactccccgacttcatcagaagacctgctaacatctagacttgtctgttgtcaccaccatctcctttgggataccacctcaaggtactcaagttcgcctccagcctccaattcctttcctgcggtgggaagagaggggagacccagcttcatgttgctcagtgactatagattcccaaacaaatgacaggggaatttagaaacatttctgccttaaaactcaaatgtcatttataactctaaacaagggaatctggaactcaaaacataatgatttggtcatcactttgggaaatttttggctaaaaattaagaatggtttccttctccttggcaggcataaagttaattaataaattctcttcataaggcagctggttaaagtttcagaactccacaactccaggagatacacatttgaaagaatatttttgataaccaattacctttattttctatgcaagaaaatattaaagaatattcagatactaattacactaattcctcagccttctgataatgagatagttctctctttgaactctttcaagatctaatggcatcgagagactctcctttatgtcgtaaaactaacagacaaaattacctggcccagctttttccacctgagtgacctcacgctctctttaatacccaaaatctattgacagagattatgtcccattataatattcccttttatgttttggcactgagcagtgcaactgacagagctataacaaagtaacaaccacattcacaggacagagacggagtcttacagagacggagtcttacaaagactaaatgacatcttacgccttcattctcttttccttgttaggaactctcataaaaaagccacagccatgccccctcagcctgtttagcaggttcatgcattacagattgaagtattgtcacctaggaagtaggcagctaattttttccagcttctgaaacaagattacaaaggggttcctggaatggctaactttaccaacgggggcagaggaagattagtttttcattttttgaagttggaaacgtaacagtgagaaagagacaaaattatctctcaataaattaatctacaaaaaaataaataaaatgcaaagctggttccacagggagtttacattctgggagccaaataagatacatatataaaactcttagaacaaggtcaaatgggataagtgtagtagtgacatagggtagcacagagttttgttttaatatcttctgctaactttaaaaaataaatatgtgattttaagtgcatattacactaatttaataaaaatctcatattttgcctttatgctcagtctgaaacatggaagatttaaagttactaatactgtaaaactgcttcagctctgacgaatgaagtatctgtgtacagaatgatgagttgttagttaatagtactctttgggccatgcttgggatattggccttttctaggagtctgtatgagaatagtcatttatctccttatgctcaatgctttcaacttgtcaaatgaccatgtttcataagatacaacataaaattgttctataattaacaaaagaaaaaagaattctatctgctgagaaaatagaaaagacgttggagaagagagaatatttgacccagacatttaaaatatccgccgaatttgctatgtgtagatggatgaaaggtctgccaagagaagtgaaggttgtgaacaaagacatggaggcggaagaaaggtagtgtgcacactgaatgcgttgtgcctttccatatgactgacatgtcaatgtaaactccacaaagggagggttttgatctggtttgtttgccgatgttacttaagtatctggaaaagtgcctggcatatatcaggtgcatgaagaagtgaataaatgaagtgtcagatgcccagaatatgaataatacttgatagatgcagtactggcaactttcttgaagctaatgaagtggttaggactccatagttcaacagaaaccaagttcacttaagcaaacatggagtttgagtttatcatgggactcaacatcaagaaagtgtttggatcttgagtagactggagatggaaacagtctgtctctgtcttttgtcacttcttcctccacatctgtgtggctggctgctatttcagtatcctggtccacctggtcctgagtccccatggtgagggaaagctgactccatagctgccagaatcacatgtagtggctctctttgaccaggtcagctgcgtagataccctctcttgctccagtcctctgtagcaagagggtaggtttaccactaaggatcaggggagaagaactattgggggaattgttaagagcagacactcagaaaaattggcacctataatatgcaattagaattcattaaaacatgtggccaggtatgttcttattttgtgtttttacatatctaatctctaagtactattcatatggaatgtattattctaaaaaaattgcctgttagttcatgcagttcccactctcttttcatctctaacatcttggcaatcgtttaccagttgttgatcacctgtctcctcatcttctttcaactttgccctgactctaccagatactgggcaacatcatttcccagacattgagtaacttcaaatgaatgtgttcatgctactccaactggcttttgggaaagcactggatagagtttttgagctggaacaggaaattatcttacttaatttctttcttttatagataaaaagatggatccacaagatggacccattggtccataattaagggctagtaaatgttttgtaaacatagaaatcaaaattacttttctgtgattctagaacaggaaaaaatggtgaacttttaggtatgttgcaaagaacagtggattattctttgggctcttgggaccaacagccttagttttattgctttgcaagctatgtggtcttgaataaacctcagtaaggctcagaaagcttcagtgttctcaagtataaataggaataattataatataataacattaatagtatttatctcaccatcctgtaataaggaagagaaggattaaatattgaaggttatattgataaatgataaaacacatgcaatgattgtaataagtgtgttagatggcaaaagaaaaataatgaggatgaaatatttacttccaatgactaatctacacataatcgtgattttatgtatgactgaatgtttaaggctgattccattttagaatacaatatataacataaaaagctctactctcagttccaagagttataattagtttggcatggatttttattgtcttagaaaaaactgatattcatggtttttataattctatctttgggtaataggcaattggactctctttctatatatatttgcttattaaaatgtgttattataattaagctttaggctgtgtccacaagatgggaaaacattggagtaaaatatagtaaaaccatagaaattgagagtgggttgaaagtcttgtttaatctgtaattacagatgaagatagtaagaatgtaaatgtccatagaagacttcagtggctttgttaaaggcatgtgttcatcagtgttgaagtaaaactcacattttgtgactctgagctgttcactataatatgaaacctaatcctaaaacacaatattaaaacagaaaaatgtgaagccatagatctgtaataaagggccacctgattgtttcctggtggaataaaaagacagttttatttataagatatatcatttttatagataacaatgattcatattaggaataaagtaacagtttcaaactaaaataatgctaaagtttttcaagtactacttgaaaatagctatatttactttcaaaccttttcctctttgagtcattaggttcatgatattatatagcaatagggaatgaaagagaagcaaggagaagcaatactgggagattacagagaagaaaggaaaaaaggctgagagaaaagaggttgaggaagaaatcataaatctggattgtgagaaagtgtttaatatttagccactagatggcgatgtaatgtaaggtgctgtcttgactttttttttttttttttgaaacaagctatttgctgatttgtattaggtaccatagagtgaggcgaggatgaagccgagaggatactgcagaggtctctggtgcatgtgtgtatgtgtgcgtttgtgtgtgtttgtgtgtctgtgtgttctgccccagtgagactgcagcccttgtaaatactttgacaccttttgcaagaaggaatctgaacaattgcaactgaaggcacattgttatcatctcgtctttgggtgatgctgttcctcactgcagatggataattttccttttaatcaggtaagccatctaattgtttcatcttgattttaagtttattcattccagttattcctttggaaaaagagtccatggaaattcagtttgggcagagcaggaagtccatttttgtatgtgtattcagaccaactgtccccctcctccctctcctcctcttctcctcccctcccctcccccctcctctctcaaccttccatgaactgaaatcaggtttgttttgcagttcagcattttgatagaagatgggattctttggcctgaaatagcttggcatctggccagttcttgcctttgcttgccttcatcctattcaaggtcccttttgatcctgttgaagccccctccttcactggtgctttggaagtggactagctggctgggaatagaggtcatattgttcttaaggacggagcaaaaattagatctcagttttaactccacaggaagaaagaaggcagcggggctgctgctggagcctagcattgcaggggtattcagcttcctgaggctgaggctgggcttttgagaagaaatgcctcatgccttgaacaaggaaggggcaatgatttccgccccccacctctgccaactcctattgagccacactaaaaaagagcttgagcagagtggtaaagagtccccttttctatccaatgccaaataggaaacattgacttacttttacttagacagaggtcacaaccagcaatgatactgcagatactgctcagttcctagtgtgaaccgtcttgcttttcagaacagcataagaattatttctgagtggaggtgaggcttgtccaaatgtctttgctatcatggatttcctgactcctacctgtttgaggtatgtgtttaaagacccgacccacttgctgcatttacttctcatttctttttgttctctttgattactcactggtgattgttaacaaatcggtctggagtggtgggtatgtgcttttcacctgtccaatgcaacaattaagtcaaggcagggtatattactgtcaatatgtgcatgtgactaaatatttctgagtgcagtagcaaacttgcaaattgccaattgctgttgctatcacacctataaaatgtgtcttcttcttctatggatttacaggttcacgtggtatttctgatgcgctagtatagtaacagaacatatttctccaaaaagcactttaaatcatcccaagaggatgttgccagacagaaataggaaaattccatgctgaggttggtgattcctgctttagtttctcctgcccagagaagtgggtagcttacctttcctatttgctgcaatacctggcacgccagggtgatgcaactgggagcttctgcacgttcgcggggcatctgacattcttctttccctcagctgtgcatttcaggagaatgactgtggtgaaaaactcttttaaaactctcttttatgattgttgcttttgtaattgcaatgaagcaattacaaaatcacatctctcttctaggaggagttttgcaatttaggccttccttcacaaagctcctggaagagatttttagctggtgtctattttaggaacataatgtgtagacaggaatgaatggccacagagatttacgggaaaccaatttcttggagagggtgaggtaacattataaaccactagaacagagcacaagtggctggttatatcacatggacccagcaatggaattagttttcattaaactcactgtaactcatttgtgtggctgtttttcctccttccttcacattgtttgtctgttttgtttcaaatatctatataggaggccaggatacccagagtgttcatactggtaacaataacacattggattttgctgccaatactaatagacttggtttacatgccccctcttgctgggaaatgtgctgtctggagagtcatttattatggtaatttctctttaagacatggcaggagggattgtccatctatgggctggggcaaggcggggcacaattggaggcctagttaattatacagtattcaagaaggcactaaggagctcagtcaggattctgttgtaccaaccagagataccaggggcaaccagaccgactagatacccaaagtaaactctatcaccaccaacagaggaatccagtaagaaacattctagttccttgtatagagggtactatcagggaatccagacaatcagagagggtaaacacaagagcacctcatctgggaattgctgacgaagaagagaaaatctggggcttgcttggtgttacctctaggacgtcaccaaccaggcatttctcaagggtttatgtcggtgtgagcctgacagtgacacacaaaagcatccctccaaaatttagcctggggaccttgaaaggtattgctttctccctgggcagttggagaggctgaacctactattttctccctgtactcgccaaagggcacaaagcctactctcttccagctacctcagaatggggagggtgggagaaacagatcccagagaaggatgggagagaatcagcaattgaaggtcctgtatagtcaccctcagggtcaatggggctgtgctccgtgaggttatcacttcctttttaaattctaattagtgaatgaagcatgttccaccgctcaattgagattgcattagtttagggtagggtgggaagaaatttattctcattgcacttgtgatcagaaaaataagttgtgacagaattccccaagctgccccaaagtttgcttttccaacttttaaattttgtccacattcctagatttccatttattaattgttttatttatcaaaaacatatagcatttactctgtgccagccactatcctaagcagtactttgcaaatatgatctcatttaatcctatgaggtagatactattgttaattttacaggtgacaaaaccaaggcacagtgaggttcaattaacttgctgggttatacagttagtaagtggcagaatccaagcagtccagccacaccgtggccatggcgtctgtgttcttgatgtttgctcatcatccatgtgatggtagagctacagcttagccaagagactcaggactgaagttgggtgcagtcgtacatgtgagctgtaattcatctgctttctgacatgccaaaattccaaaaacagtttggtttagaatgattacccaaatccactccatttgtttgtttgtttgtttgttgtttttttgagacagagtctcactctgtcacccaggctgcagtgcagtggcacgttcttggctcactgcaatttctgcctcccgggttgaagtgattctcctgcctcagcctccccagtagctgggactacaggcgagtgtcaccatgcctggctaatttttgtattttgtagagatggggtttcactatgttggcccggctagtctcgatctcctgacctcaagtgatctgcctgcctcagcctcccaaagtgctgggattacaggagtgagccatcacaccgggctatttgttaaaaaattaaaaaaaaaaaagctctcctgtacaatagaagatagaagggtctgcgttctaagtgcaggaatgtggtgaataaagcaaaattcctacccacatgcagctttcagtctggtgatagagttggacagtaggcaaatcaatgtgcaaagaaatgtcagtaaatgtaagttctttgaagaaaaatactgcaagataaagagatagtgaggatgagaggggcatgcaaacagaaaataatgaaagaggtggagaaaaagtttttttaagcagaaatctaatgaggccaatgatggattgaatcaaaggtgctaaagggtgaagtgcctcacaggtatgaagagtggcacaaaccttgtgggtgatcctgaaagtaaaagaaacgaacagaaatagcaccatagaggtgtgcagccagatctgtggaatctcagagattgggcttagggctctaactgcccccgacttttaaaaaaacaaatcaaagagttatgtcaaataaatttaaaacattcaatgttaacaagttattaggtttaaaaaaaacataaatcagtcattttcacaaaaaaaagttttgagagtttgtaaagttctctgaaaaaatgttgcagttcctagaatgcaaaaaaattgcctcaaaaatgttgaaaagaactgatccaaaggtagtgagttatctcagttgattgttcacagtcagttacagatcaaactccttgttctacgctttcccctcttctcactactgctcttgtctaaaaacttttttaaaaattaaaaaatattgaaaaggtactatttgatgaaaaaaaaattgtttgaatgagatcattggttagaatgatatagtcacccagtcagtttttcttcctccagaaatgatacactgaccaggtgcaggcaagaaagagacactaagcatgaaaaccagtgtttacatcccccatagtggccaggacacaggagctgcttggagggatttgaacaaatctttttttttttttttttttttttttttttttttttttttgcaaatgaatgagtaggaatgtgatttcaaaataatttgataaacatcagctttcattttcatctatgttaaaacttttgttaccatatttttattccttcaagactcatattccaatggtttatctttttatatttttttcactatttgcttcccctcattctcagttacctatggacactgtagttcttctctagaaaatgtgaatttgcttctcttctaacttagaatcaacctgacattttagcttttctctgtaaatggtcaaaagtctttgccttatcatattgcctgtttctcctttggtgctctacctacaaacttagatttaattttgatgaagaatctactctaacttttttcttttgtcacttgtgcttttagtctcatgtataagaaaccgttgcctaatctgaggtcataaaaatttacttctattatttttcaactagttgtataattttagctcttgcatttagatctaggattcattctgagtcaactttttgcatataatgtgaggtaggggttcagcattactcttttgtttgttcatatctagttgtcccagcaccacgtgttgaaaagacaattctttccccggtgaattgtcttattaacattgttgtccatgcgtttatgattttagcatcaattatttcttacagtgggtactagggatatatcttttaagaaaaggtcagtgagattctttgttcttgagaatccacataactttaaagaatcagaaaactgatccatatacccttaactattaaacactttattgatctaacttcacaacaaaatgtttcttctcattattggaaacatattcatttgtgactccactgaaaatttaaggagataatgagcaaatatttccagggaaaggttatatttattccaaagaaacatatttactgtattgcacatgctttcccaaagttacacaaatattatccatgttctttgtaatatatgttgctagtatgcttttgtttcacagataccattggggaaactactgaacttgagatagaggtgtgccattcaaatagggttggtttctgtattagttaacttgggctaccatgacaaagtaccacagacagggtggcttaaataacagtatttatcacagttctggaggctcgaagtccaagaacaaggtactgggaagtttggtgtcttctaaagcccgtctccttggcttgctgatgtctgtcttttcctctgtgcatgtgcattcctggtgtctcttttctgtctaaatttcatcttcttttaaggacacaagtcatattggattgtggttcaccctaaaagtctcatttcactaaaccacttcttcaaaggctctaactcctaacacagtcacattctgaggtaccggagtttgagactccaacatatggatttggggaggatacaattcagcctctaacagttgtctctggcaatacttatgactactaaaatcataagcaaagaaggttaaattgatatttttttgttgttgatgaaactgttgtggttattttataaatgatggattttcattattcataccctcctcctactggataataatgagttatctgtgtatgtgttaagattctaataaaggcaattaattaggtttgtaattacaggcatgatgactaacaaagtgggggcagaaataaaatgatggtgacactgattccactgctgtgcctataatgtcacatttacattcatgatctgtgataagaattaagatgctcatttatttcagtgaggaaagtgacagaaaaggatataaaattaggaattcatggggaattggtaaaaaaaaattaaagtattacaataagtaactgaaactgactcaggttaatttaagtataaaagcaatgtcttcaaaagatattatagttcacagagttaagggatagctacaatctagactgaaaaatgccaggagcagagaaaactataagagcagatagcccagttggtagacttttggtggtttctgtaaggtgctgtaatctagaatgaatcagctcaactgctttcaggctctttgtctttctttctttttctttttttttttttttcttttttttcctgacattcatgtttaacaccaaaattccaggaagtaaacatctggttggtcaagtttgggtcatgaatctgatccttttagttaagagtaaacttaactaacagttccttgactgacatttccaccaaactatccccatataggaaaactaattcaacccaaacaaaattggagagattaatagtctacataggccagatacagtggctcaaacctgtaattccagcactttggaaggccaaggtgggcagatcacctgaggtcaggagtttgggaccagcctggccaacatggtgaaaccccgtctctactaaaaatacaaaaaaattagccaggcatggtggtgtgcacctgcagtcccagctactcaggaggctgagccaggagagtcacttgaacccgggaggtggaggttgcagcaagccgagatcatgccactgcactccggcctggcgtctggatgacagagcaagactctgtctcaaaaaaaaaaaaaaaaaaaaaaaaaaaagagaaaagaaaaaagaaaacagtctacatacacaatgctggaaggttgaaagaatggctaaataaatcatagtctaggcaaatgatgaaatattatagtaccattaaacataatgtttcaatgaatatttaattctatataaaattgcccaggttataatagtatattaaaaagtaccttacaaacatatatatctaggatggccccaattacggaaaaaaaacaaacatgtttttccttagaaaaagccctgaagataatataatagttatctctggtttatagaattaggatttctgttttcttctttataaagtttttgttttaaaaatagaatattacatcttattttttcttataataaaagtaatacataaaggaaaaggaacataaagtacataaaaaaggaacataaagtgcataaaacaaaaaaaaaatttaaatagaatattacatcttatttttcttatgacaaaagtaatacataaagcaaaagtaatacataaagcaaaagggaaatataaattaataaaatgatgaaataactcacaattttacacaacaaaattattattgttaataatttattttttcaaatgctttggtattgtttcttaccaaacaatttggcattgttttggtatgttttcttaaaataaagttcaaaataaacatatgttgccttaaaaactagaataaaagtgtacattagttttcaaatagaatttagtaatctatttcatgcaaagatactcattgtatctttaatcaaaatagtaaatttagtttaaattattgatgaaacaattgaatgtttgaatattttgtcttttggaatattaataaaactaggccacaaaccttgtataataaaagtacagtattttgaaaattttgtaacaatggaaaagctttgggaatcggtctaatataaaattagacttgaaatagcaaattggtggtgttctgaaaatcatgttacttggtaacctaagttttctctttagaactcagcacgaattttaagaaatttatcttatatttataaaacatctactatttgcaatgagttgtttttagcaaaacttgacctcaaattgaacatttgagaatactgaagaataaataagaagcacctgtaaatactgacatagtatgtccttaaatttttaaactacttagaaccaaattcatcaagttggcaaaatgaagttactagattatcaaatggaatggcaagtgaaaatgagccagaggtggcagaatggagtaagaagggtaattattagggaatgctgcatttggagatgtgaaattatatgtgttgaggatgtgaggaaagaaatctgtgtgaggagaaatagattattaatgatgtaacttagtaacatcagattaagggtccccaaaccctgggccacggaccagtactggtccctggcctgttaggaactgggtcgcacagtaggaggtgagcagtgggccagggagcattacagcctgagctccgcctcctgtcagatcagtggcggcattagattctcataggagcacaaaccctattgtgaactgtgcatgcacaggatctaggttgtgtgctccttatgagattctaatgccagcccccactccccacaatgtccgtggaacaactgtcttccacaaaaccagtccctggtgccaaaaaggttggggactccttatctagattattgtaaagcaaatattcataattttaagattaaagaaaaaatccaataaagatgagaaaccggatctcagagtttccaattacatattcatagaggaaagaaagctaagagaattctgtcacatacatatttcaatctaagaaattcagtggatttgaaaatcctggaaagagttactttgagacttcacaaatgctaccaggcagcagttttgatattaccctggaatgtgatatgccacttaaaaaggccagtagtattttgggctatgtatgtcagtgtgttgggacaaaaccaaggagaaaacagtccggtgtcaggtctagaataccatcatttcagtgccacctgggcctcagcatttcaggtttcaggtgatttgaggagtctgtgaggtcgcacaataatatttaaggcctttaaagggtcaatcaacttgtacaaatgaaggcaagagtgcctttggaagacattccaaaaaggaagtttgagcatactcaagaagaatctagccactgcactccagcctgcgcaagagagtgagacgctttctcaaaaaaaaaaaaaaaaaaaaaaaaaaaagaaactaaatagaaatcagtaagcaaagaaaaagaaaataggagtgtgatttttcttcctgaaatctctgtggaatagcaaaaagtggaatcttgactgtatcttctctgggaccaaactttatcttactctccctgactctctctctctctctctcttttttttttcattcctaggcattttgttttactctgtttttgcatactctgctgatttctaaccctccttccattcagtaacatataaaaaaaacttttcacagtcatgttctcagaatgttcatagtctttaatgcatatagaatataatccaaaaaatcaaaaaaaaaatttttttttttgagacagagtctcactctattgcccaggctggagtgcaatggcaggatctcggctcactgcaatctccgcctcctgggttcaagcgattctcctgcctcagcctcctgagtagctgggattacaggcgcacactaccacacccagctaatttttctatgttggccaggctgaactcctgatctcgtgatccgcctgccttggcctcccaaagtgctgggattacaggcatgaacctccgtgcccggccaaaaaattcttaatgtgattttagcagttattttcaaaatgtggtccacagatgctcttgcattcccttgagactttttaaatgattcatcaggtccaaactattttcataatgatacaaaaacattatttacctttttcactgtgttgacatttggaagaacaatgaaacccctagccttaacacttatcaagacagtgacaacaaactatactgtcattgtattcttcactgtaattcattcccagtaaaaataagtaaataaataaatgaataaaattaaagccagttgcactaaaagaatgtctttgacgaaacactagaaattaattttatttaatctataccattaagtacacatatttttaatattcagtatacatgaagaaatggaaagtatacatgattaacatctgctgtatatcaacaataatgctggttgtcttaaggtaaagcacttgtgtagttgtttgagttgcaagctaaactagctgtacttccatagaatactatttttatttgaaaaaatgactgagagacaaattgtgattattcaaacagatattgaaaagacaaatttttgaaaataaatggagactgtcattttaaaaatacatttgacaatatttgttgtcagtgacaaaatttggcctttcaagagaaaattattattttgaaaaagatgcatctgccaccatgagctcaacagcttctcaaaacttacagggtttctgatgtgattagtggtaatattaacagatgaataatgaaatcttccaatattttgaagacctgcataacttagccaagcactcatcccattagatctttttcttttagaaatatggttattttcacttgaaatttattttgttgacatgtgatttatgattataatttataaatttattaattgatgtgcttgtgatttttctgctttctaacatggtaaatggcaatacattgaactcattataaagaagaattttttgtttcctcaataatattaacaatcaaaaggagtcttgagacaaaaaaattatgacaaggatgaatttgataattcatcagattctgggacactgaatctgatgaatttgataattcatcagattctgggacactgaatctgatgaattatcagattatctgataaattattcagattaagtttgttgcactgtattagttgagattattataatgcagataattgagtcccccagaattatgcaggatagagaagatatttgtcacattacacaagttagtacatttttcattactgtaatatgagctgcacatatcagtttagttcagtaagttctgtataaagtgagtaaaaattgttgcaaagcaaatcagaggattataaaatataaatgttctaatactcttgttaggactttcatctttcctcacctaaaccaatgtaagaagtttctattggtctttttctaaatgttcacccactcccttccctcaattagaacctgatctccatactaccaccagtgacctttcaaacatgtgggccacatctctactttttaagactgtaagttatatcctggagtaaaagctattcagttattcagcatggctggctttcatgagctgtccaggtttatttcttaccccatggtcgatctaccttaccattagtccttcagaaagaactaattgcatttctgtgaagacctaaagctgtttctatctctaggtctttgctactgcttctttatttggtgaatagccacgacctcttcttccccaagtatgattaatttccttttgtgttgtgcctaggtcctgtatacatttctatcatctctcccactgcactttattgtgcttattcccctgtcttcctctgctatactgtaccttctttgcaatatggtgcagcatattgtctgatgtgactaagtctcattgccactgcctacttccgttttcggtgtctaggttctcaatagaaattgttaaatgaaaatgaaacaaaacaaaaacatttttagggttacctttaatattaatacctgacagttttacattttataggatgctttcgcaaatactgtttttgtagaaatatgcttgaagcatataataatttaaataattcttttatttcttatgcaagtcccaaactcctattctaaactcatatatactatgagtattgaactacttatatatactatgattaagcactgcttttcaaagtaattctgaatgcattttttcttcaaattattactgttagctgtttttacttattcagtgtctgagaaatttgattacttctccttttatcattttgaggtattcttttttgtttgtttgttttagacggagtttcgctcttgtttcccaggctgctggagtgcaatgaagcaatctcggctcactgcaacctccacttcctgggttcaagcaattctcctgtctcagccccccaagtggcggggactacaagcatgcgccaccatgcccagctaattttttgtatttttagtagagatggggtttcatcatgttgaccaggctggtcttgaactcctgacctcaggtgatccacctgtttcgaccttccaaagttacaggcgtgagctaccgtgcctagctcattttgaggcattctttggtctttgcttgagtctaattattagcaaattattcaagtactatattttatagttatggaatgcattgatattatagaaaacagaatatttagaaaagcataaagaagaaaataatatttgtgatctcataatctatgtgattttccccacaataataaaatattgcttttaacatgttaatattttgctctaaaccatttctcttcctgtttgaataatgggattcctatggtgttttcaattttgtagcacatattacatcttaaacattttttaatgccatcagaatagttcaaaagtataatattaatggcttcataatatttccttgtagttttacatttatttaattattctgataatcatggaaattttatttcattttagttgcatcattacttttgaagtaaatttaaataacacattaaaaataccaagaattttacatttttattaatagccaaaagatcatctgttgtataaacagatcccaaaacttagggttttcttgattaaggaaaacagaaggccaacaaagtccatgcagtacacacaagatatagtcaattaacacttaaatctgaaggaaacaattccagtgcatggtttcttgcactgggcttgttctctttctttttgattctcccttctggtcctcactgggagtaggaatcacacaaagagcttggctcactactttcattcactctctccttctctcatcatttgttcaaaatgaacccatttgggctagttctttaatactctcagatgttttcctgctttcagaaacaggcacaaaataatttatatattaacattgaacaactctctgaaaatcattgcattgtttaactaatttctgatttttctaccactttacagcagaaaacaactttcttcttagagttcttgatacaaactttttaagaaatttaaaatatacattaaaatctgtctttgatgagcatactaaataatatgatagctggaagggaggtaaggaagtggtaacagttttaaagttcttatttatttttcaaatatgaatagttacaggtttgttattatctaagaaagagaattattaatattctccatgagatccaaggatcacattatatctcaaaccaaggtaacattagagtgtgaaaaacaattttaattattattttatcaattttaaaaatttttgtatatttgtggggtacaagtgcaattttgctacattgatatattgcattttggtgaagttacggccttcagtgcatccatcactggagcaatgtgcattgtatccaccaagcaacctcctatcatccacccaccttgcacctactacccttccaagtctccattgtgttttatcttaaagtgtagtaattcttgccctctagcaataaccttggtgtatgcatctaattctcagagggtaatctacaatttcaaaactttaaaagtagctgtttaaaattatagcacacctgttattttatatttatgattagtatatatatcggttgttcaagctaaaagacaaatgacaggaaacattttaatcaatagcattcttttagctattatggtaatattcatatttattgggacttagagtaaaacagtcaggaagttggtcagagcaagaaataattttctcattcttttttcatttactagtcattcatttaacaatatgtattgagaacctagtatatttaatactaggtgccaagatatctactcttaagtacttagattctaaatttaaaaaaaagccaagtactactgttttaaccacaccacttctgacatcaaatatgtgggtcgttttgtttttgtttttgtttctgtttttccctcaccactcaattgtctgacagccagttgagtgtcccacaattcaattcaataataacttggcattatcctcagataccacaagtcaatggctcagtctcacaaaactgccccacttcaaacatcagttgcaagacccaggcctctggaacttctgactgaccagctataaatcctccagttcaataatgtgctacaacagctcacagaatttaagagcttactatttccagtttattgtaaaggaacagcctggaagagacatatagcagaaagtatagggtaggagaagctatccaaactccataatttagagtttttatggaggtctcattatgtaggcataattgattaaatcattgaccattggtgattagcttaatcttcaacccctagcccatcccttgcagatgcaggtctttctagtgactagcctcaatcctgaagctatgtaggggccctcagccacttgtcatctcattagcatacaaaaaggcactccagagattctaaagattatagaagctcttatgtcagaaaatggaactaaggccaaatataagaaagatgctgctatcaccaatattaatcaggaaataacaagggttataggagctctgtgccaggcagcaagaactaagaccaaatacaggcacacctcagagatattacacatttggttccagcccaccacaaaaaagccaatattgcaataaagtgagtcacacaagtgttttgatttcccagtgcatataaaagttatgtttacaccatactatagtctattaggtatgtgatagtattatgttgaaaaaaagtgcataccttaatttaaaaatgctttattgctaaaaaatgctaacagtcatctgagccttcagtgagtcatataatctttttgctggtggagagtctcgctttgatgttgatggatgctgactgatcagggtggtagttgctgaaggttgagatgactgtgacaatttcttacaataaaacaacaatgaagtttgccacgttgattgatcttcctttcacaaaagattcctctgtagcatgtgatgctgtttgatagcattttacccacagtataacttgtttcaaaattggagtcaatgctttcaagccctgccactgctttatcaaataaatttatgtaatatctaaatccttttttgtcatttcaacaatgtcctcagcatcttcaccaggagtaggttctatttcaagaaatcactttctttgctcgtctataagaagcaactcctcctctcttaaggttttatcatgacattgcagcaattcagtcacatcttcaggctgcattctaattctagttctcttgctatttctgccacatttacagttacttcttccactgaatcttgtacccctcaaagtcatccatgaaagttggaatcgatttcttccaaactcctgttcatatggatatttttacctcctcccatgaattacaaatgttcttaatgggatctaggatggtgaattttatccagatgattttcaatttactttgctcagatccatcagaggaatcactctctatagcagctatagtcttataaaatgtatgtcttaaataataagacttgaaaataaaaattattcctcaatccatgagctgcagagtgcgtgttgtgctatcaggcatgaaaataacattaatctccttgtacatctccatcagagctctttgcaacattgtcagtcagcggtaatattttgaatggaatcttttttttttttctgagcagtaggtctcaatagcaggcttaaaacattcaataaagcatgctgtaaacagatgtgctgccattcaggctttgctgttctacttatagagcacaggcagagtatatttagcatacttcttaagggccctaggatttttttgactagtaaatgaaaattggcttcaacttaaagtcactggtgacattagctcctaacaagagactgaacctattctgtgaagctttaaagccaagcattgacttctcctctctagctatgaaagtcctagatggcatcttcttttaatataaggctgtttcatctatattgaaaatctgttgtttagtgtagtcaccttcatcaatgattgtattagtctgttctcaccctactaataaagacatacccgagactggctaatttataaaggaaagcagtttaacggactcacagttccacatggctagggaggcctcaaacaatcatggtggaagatgaaggaggagcaaagggatgttttacatggtggcaggcaaagaaagtttgtgtagagcaactcccctttataaaaccatcagatctcctgagacttattcactaccacaagatcagcatgagaaggacctgcccccatgattcaattacctcccactgggttcctcccatgacatgtgggaattatgggagctacaattcaagatgagatttgggtggggacatagccaaaccatatcaatgatcttagctagatcttctggataacttgctgcagcttctacaccagtacctactgcttaaccttgcactttaattttatggaggcagcttctttccttaaacctcataaaccaaactctgctaacttcaaacttttcttctgtagctttcttacctctctcagccttcacagagttcaagagagttagagccttgctctgaattaggctttggctcaagggaatgttatggctggttcaatcttttgttcagactttcttcatatcagcaataaagccattttactttcttatcatttttgtgttcactggagtagcacttttaatttccttcaagaatatttaagaatatttctttttcattcacaactcggctaactgtttggttcatgaggcctagcatttggcctatctaggtttcaacatgtcttcctcacaaagcttaattatttctagcttttaatttaaagtgagaaacattcaattcttcctttgacttgaacacttaaaggccattgtagggattaaaaaaaaattttttttatttgtatggctacatagtaggtgtatacctttatgggttacatgagatgttttgatacaggcgtatcatatgcaataatcacatgagagtaaatggggtatgtgtcccctcaagcatttatcattactttgtgttacaaacattccaattatactcttttagctatttttcaatatagaataaattattgttgactgtgataactgttgtgttactagatcttattctatttaactacatttctggatcttattctatctaactacatttttatacccattaatcattcccacctccccaccacccacatagtagggttattgattggaataatttcaatattcttgtgtctcaaggaactgggaagcccaaggagaggaagagagacgggaacagcatgttggtggagcagtcagagcagacgtaacaccaattaagttcactcttatttgggtgcagttcttgccatccccaagcaattactaaagtgacattaaatattactgatcacaggtcaccataacagatataataatagtgaaaaagtttgaaatattgcaagaattaccaaaatgtgacacagatacacgaagtgagcacatgctgttggaaaaatggcaccaaaattgacttgctggatgtagggttgccacaaactttcaatttgtgaaaaactgtatctgtgaagcacaataaagcaaagtacaatatgtcaaggtatgtatgtatatacttcttatgataagaccacaccaagtatataaaatattttctaaagatggcacttgttacttctttgagactctcaatgtgttgcatactatgtttaagcttcaaattactgatcttaaggaaatcaatgttcttatctatctgtactgttatcttgatgtaaattcagtagtgtacctagttagtcagagtaggatccaaaattccaacctaaattttgaaacaaagatttttctttattataacgcccaacataacaccaagagtagttaataaacatactaagatgaacaattattcttgactttaggcaaaaagaaaattactaaaagatgtatttattaatcaaatgctgtaatttttgttattatttctgtaaagttctaaactccttgaaatcctatagaagagaaaagaataaaaaattgtcaaggcattctgattcaaacagaaaaagaagggaatcaaataattatcactgcttacatgattatcattgtagttttagctccttgttagttcagtgcttttttgtatatttatagagttgtgcagcaatcattacaatctcattttagaacatttccattgagctaaaaagaaacttgatgcccacttgtagtcactctctattcccactcccagtcctaggcaatcactatttgctgtctctgtacatttgcttattctagacattttatatgaatagaatcatgcaatgtgtcatcttttgtgactttcttctttcacttaacataatatctttgagattcactcacctaacagcatgtttcagtattcattcattttaattgaccaatcatactcccttatatggatataccacattttgtttatccatttaccagctaatggacatttgggtgctttccacttttgggctattgttaataaggctgctatgaacatgtccatataagtcttcatatggatacatgttttcatttaccttgattagatacctaggaatgaaattactgggtcatataatgaatctatgtttaacattgtaagacactgccagtgtatttccaaatggctgtaccattttacattcctactaacaatatatgagggttccagtttctctatatccttcccaacacttgtgattatctgttttttttattattattatagtcattccagtgtgtgtgacgtgatgtctcattgggttttttatttgcatttccttcatgattaatgatgttgagcatctgatgtgctcgttgattagtcatttatcttctttggacaagtatctacccaaatcttctgcctatttttatagttaggttctttggggttttttattattgacttgtaagagttttaaaatatatatatatatgccagatacaatcgcttatcagatatatgatttgcaaatacgttctttcaatctgtgggttgtcttcattttttgatgttgtcttttgaagggcaaatgattttttatgaagtacaatttatcaatgttctcttttgaccacttatgcatttggtgttgcagccaagaaattattaccttatgtatgtgcaccatatttactcatatttttaaagaattatagttttagttcttacgtttaaatttatgattaattttgaattaatctttgtacattgttatccacagtttcaaatccttccttttgcatgtggatatctggtttttctagtactagttgctgaaatgattattctttcccaattaaattatgttagcacccaaagctgaattgataaaaattgttagccaagttgtgttctcttcttatttattcaagaatggttcagaataagaactattgctactttacatgtgtcagatatctaaatattaagaaaagtatgtgatcactataaaattcatactttccagtaaattacatttaccatacaatgttcaatactgtaacatattctgtattttaacttttgatttttttttataactgttgaattttgaactatcgtgttttgtaacctctcactcttaggtgttgttattccaaatattttattaattaattcagcaactattgtgtgactgttatgggtaaagtactttgcacgatacagtgaagaatgcaaaggtaaatgctgctctcaaggtgcttatggactaaagcaaaaaacaagacatattcacaagcaaatatactgggaggtagaagtcagtcgtcaagtaacaccagagttgcagataaatgcttatgtgaattcgaagattacttgctttttgtttcagaaaagtgctagtggatgaagagatcaacagcctatatgacagcaaatttggttccatgttggtctatacaagtagttaagggcaaagaataagcagtaagtttctgatgaatataaataaaatgtatgtagctgttaagaagtatagtctgtgattttaaaaaaacatgaataatgatattcatgtacaagacatgacagttaccagtgtattgcctcttagctctctttggtagctaaccagaaatagtgtattgggcacttaaagcatttttcttagaccgtgagcataacgttactctttgtcagtagagggcagtgaagggtcactgcaggaggaaggggcttctcttcctggttctaatgctacattttgattttacttcgatcattagcaatgtggaccattagcaatggaccattggcaacgtgcttgtgtaatgacatctggtggtgtttttccccagccacatgcccagatggggcagtctgttggtgacttcacagcctctatataagggcctagtgaccactttgccacagttctcccagcactgacaccgcacactgccaacacagacacatcctcacttcagtgccgcactccttctgaaggcccacccaccaaccttagctcacctgtgccctaaagaattgtttctgcttgcccaacagtagcccaactgtggaccagagctccggccaggacaccccagcaaactattctgctgtagagaaagagggcttccaccacacttttcccaatgaagtttggaccccaaccttgggatgggaaatccttccagttcactcttctttgagtcctctaccttagctccaggataccctttagattctcttacatctttatggttactctcctatcagtacttaataattcttcatatattaaactttctctgtttaaattagcatgtggtttctgtatctttttttgtttgtttttgtttttgttttgagacggagtctcgctctatcgcccaggctggagcacagtggcgcaatctgggctcactgcaagctccgctttccaggttcacgccattctcctgccttagcctcctgagtagctgggactacaggcacttgccacccagcccggctcattttttgtatttttagtagagacgggttttcaccgtgttagccaggatggtctcgatctcctgacctcgtgatccacccgcctcggcctcccaaagtgctgggattacaggcgtgagccaccgcgcccggcccggtttctgtatcttgattgtgtcccagactgatacctgttgccacaagttattttgctcagttaatattactgattttcaaatgcttcagtttataggggtaaagacaatttcttgatgctatccctgaaaaggaattggacaagtttaacttatgtcatcttctcatgggcttcatggaaaatagcctttttcactagtgaatattggatatgctctagcatttccactgagaaataaaaattaggcattcattcaaaaaagtgtgtttgatcctatttctaattcaaatgctttgattattattgagttattcatatagtagattttctaaggattaattgtttttggccaagataaaccaaatgtggtagatgtaaactattttcatatggtcaaatacgtgatgattattttaatataaagggtttcactgaagcataactacaatgtaaagggtttcactgaagcataactacatatgtagaagttttaatgtgtatgaggtctgtaattcataaaattgttggttgattctttctgtttcacttctattggcaaaggtttaatttacattcaggcctggtggtaaccctgttaataaccaaattcattctctcattttaaacttataacttggcaaaagggaaacccttgatgaagttgtttttaaacttttatgaatgattctttttaacctttttaaactctgaaaccttttaaaagtgaaaatattcatcactttctaaagagtatccactttgtaaggtccaggtacagcaagcaaatatgtataaaacattaaattaagaaaacttcacactttttcctctatagcaaaaatcctaaggagtaagacatatgatataagctatttcccctaggacttcactgaggttatttgaaacatatcagaagctgagaaattacgtcatttcttttgctatttttattccttgaggaaataacttttttcaggaccatgataccaattcttttcttctttacaagcattcctgtgctttcttacaacagcatactggcaacacaaagtagccaaatcggctctaagacaaatgtctgtgaaggctgttggctgagaaatatcatttggcggtctcatagtctcatatataaaatgtaccttaatttttttatttttttgagacaagatctggctctgtcacgcaggttggagtgcagtggtgccaccttggctcatgcagcctccacttcccaggctcaagcaatccccccacctcagccttccaagtagctggaactacacaaacgcaccaccatgcctggttaatttttgtattttttgtagagacggggttttgccatgttgcccaggctggtgtcgagcttgtgagctcaagcaatacacctgcctcagccttccaaagtgatgggattacagatgtgagccaccatgcccagccccatttactttttaaaccaccacaatcattattatatcgtagcactctaggttcacagaggtgattagggacaactatgttggtaagtcaatgaactctcttctgttcttaccttactagattatgctgtaacattagacaatgttcatcattatctctttcttactctctcttccctgttacttcttctagaaaatgggtctttgtttgtattctgcaaagattaaagttgaattctaacaatgaaagcattcattttgactaaactctagttccataatttttcttagaaagtattggcaaatctgtttatgtctcttttcaattatttttcctactatctctatataccaccaataaaattaactaactaaatttagttttatttcaaatcactcagtggttcttttattcaaaagatattaataagcatagtgtcaggcactatgccatgaacagagatacatttccaggaaattgatataatggaaagaaactagggctagagtcagacaaatcagctctagctatacactgctctagctatacacagtatcactttaattagctacattttttctgacttttattgcttcatctgtaaaatagtgataataatatatattttcacgttgtatggtaaagtctaaagttatgttcaccaatacataatgcagttcttggcactgggtagatgcttttaaacactattagtgttctttatggtattttttctaagtgactaaaagatcatattaattttacatgcctcacatgtcctcagtcctttacctttatcttcctggtgaatttccttttattttacaaaacccatttcagctctcacctacttaggaagcttctcttaacatttttccccctcctcatatcccaaaagaagtgattatatcctcttctgtgcttcctccgtgtctcaaagataacttattgttatacttcctcagtatttatttatttatttatttatttatttatttatttatttatttaagacagagtcttgctttgtcacccaggctggagtgcagcggtgcgaactcggctcactgcaacctccacctcccgggttcaagtgattctcctgcctcagtctcccgagtagctgggaccacaggtgcctgccaccatgcccggctaaattttgtgttttcagtaaagaccaggttttgccatgttggccagactggtcttgagctcctggcctcaggtgatccgccctccttggcttcccaaagtgctgggattacaggcgtgagccaccgcgcccagcctacttcctcaatattataatatattgctattcaactgtgtctggcctaacagactgtctgctcctctagaacagaaaccgtcatatatatatatatatatctcccaaatctaaagtcaggcttgaaatctaataggcagctcaaaaacaatttattcttaaacagaattgaacaatgccttaaggtacaaaagttgtgcattatccacaaaatagctcgaatattactgaaactttgttgaatggtattttctctgaagcacccatgttgcttcaaaggacatgcttttgttcttatttatggctgtgtaatgttccctagcatatatgtaccacattttctttatccagtcagccattaatggacatctaggttgattgcatgccattgctattgtgaatagtgctgcaatgaacatatgcgtgcatgtgtctttttggtagaatgatttatagtcctttggatatatacccagtattgggattgctgggtcaaatggtagttctgttttcatttattctgagaaatcttcaaactgccttccacagtggctgaactaatatccattctcaccaccagtgtataagtgttcccttttccccacaaccttgccaacatctgttattttctgactttttttttttcttttttttcttttttttttttttgagatgtaatcttactctgtcgcccaggctggaatggagtgctgtggagcgatctcggctcactccaagctccgcctcctgggttcacgccattctcctgcctcagcctcctgagtagctgggactacaggcgcccaccaccacacccggctaattttttgtatttttagtagaaatggggtttcaccgtgttagtcaggatggtctcgatatcctgacctcgtgatccgcccgcctcaacctcccaaagtgctgggattgcaggcgcgagtcaccgcgccccgcccatgactttttaaaaattgtcattctgactggtgtgagatggtatctcattgtggttttgattttcatttctctaatgattcatgatgttgagcattttttcatatgcttgttggtcacgtgtatgtattcttttgagaactgtctttttaattctttgcccatttttaaatggggttgtttttcacttgttgatttatgtaagttccttatagatactggatattagaccttcatcatatgcatggtttgcaaatattttctcccattctgctggttgtctgtttactctattgatagttttgtttttgttgtgcagatgctctttattttaattaggtcccacttgtctatttttggttttgttgcaattgcttttggagactttgtcatgaaatctttgccaaggccttaatcgaggtatttcttagttttcttctagggtttagagttttaggtcttacatttaagtctttaatccatcttgaactgatttttgtatatggtgaaaggaaggggtccagtttcaatcttctgcgtatggttagccagttatcccagcacagtttatttaacagggagtcttttctgccttgcttgctattatcgattgtgttcaagatcagaacgtcgtatgtgtgtgactttatttctgggttctctcttctgtttcattggtctatgtgtctgtttttttttttttttaattatactttaagttttagggtacatgtgcacattgtgcaggttagttacatatgtatacatgtgccatgctggtgcgctgcacccactaactcgtcatccagcattaggtatatctcccaatgctatccctcccccctccccccaccccaccacagtccccagagtgtgatattccccttcctgtgtccatgtgatctcattgttcaattcccacctatgagtgagaatatgcggtgtttggttttttgttcttgcgatagtttacagagaatgatgatttccaattgcatccatgtccctacaaaggacatgaactcatcattttttatggctgcatagtattccatagtgtatatgtgccacattttcttaatccagtctatcattgttggacatttgggttggttccaagtctttgctattgtgaataatgccgcaataaacatacgtgtgcatgtgtctttatagcagcatgatttatagtcctttgggtatatacccagtaatgggatggctgggtcaaatggtatttctagttctagatccctgaggaatcgccacactgacttccacaatggttgaactagtttacagtcccaccaacagtgtaaaagtgttcctatttctccacatcctctccagcacctgttgtttcctgactttttaatgattgccattctaactggtgtgagatggtatctcattgtggttttgatttgcatttctctgatggccagtgatgatgagcattttttcatgtgttttttggctgcataaatgtcttcttttgagaagtgtctgttcatgtcctttgcccactttttgatggggttgtttttttcttgtaaatttgtttgagttcattgtagattctggatattagccctttgtcagatgagtaggttgtgaaaattttctcccattttgtaggttgcctgttcactctgatggtagttcttttgctgtgcagaagctctttagtttaattagatcccatttgtcaattttgtcttttgttgccattgcttttggtgttttggacatgaggtccttgcccatgcctatgtcctgaatggtaatgcctaggttttcttctagggtttttatggttttaggtctaacgtttaaatctttaatccatcttgaattgatttttgtataaggtgtaaggaagggatccagtttcagctttctacatatggctagccagttttcccagcaccatttattaaatagggaatcctttccccattgcttgtttttctcaggtttgtcaaagatcagatggttgtagatatgtggcgttatttctgagggctctgttctgttccattgatctatatctctgttttggtaccagtaccatgctgtttgggttactgtagccttgtagtatagtttgaagtcaggtagtgtgatgcctccagctttgttcttttggcttaggattgccttggcgatgcgggctcttttttggttccatatgaactttaaagtagttttttccaattctgtgaagaaaggcattggtagcttgatggggatggcattgaatctgtaaattaccttgggcagtatggccattttcacgatattgattcttcccacccatgagcatggaatgttcttccatttgtttgtatcctcttttatttccttgagcagtggtttgtagttctccttgaagaggtccttcacatcccttgtaagttggattcctaggtattttattctctttgaagcaattgtgaatgggagttcactcatgatttggctctctgtttgtctgttgttggtgtataagaatgcttgtgatttttgtacattgattttgtatcctgagactttgctgaagttgcttatcagcttaaggagattttgggctgagacaatggggttttctagatatacaatcatgtcgtctgcaaacagggacaatttgacttcctcttttcctaattgaataccctttatttccttctcctgcctaattgccctggccagaacttccaacactatgttgaataggagtggtgagagagggcatccctgccttgtgcccgttttcaaagggaatgcttccagtttttgcccattcagtatgatattggctgtgggtttgtcatagatagctcttattattttgagatacgtcccatcaatacctaatttattgagagtttttagcatgaagggttgttgaattttgtcaaaggctttttctgcatctattgagataatcatgtggtttttgtctttggctctgtttatatgctggattacatttattgatttgcgtatattgaaccagccttgcatcccagggatgaagcccacttgattgtggtggataagctgtttttgtgccagtactatgctgttttggttactgtagacttgtattatagttgggtggtgtgatgcctcagacattgttctttttgtttaggattgctttggctagtcaggatctttttgggttttatatgaattttcaaatagtttttctaattctgtgaaaaatgacattggtagtttgatagaaatagcattgaatctgtaaattgctttgggtggcatagtcattttaacaatattaattcttcctacccatgagcatggaatgtttttctatttgtgtgtgccatctctgatttctttcatcagtgtttcataattcttgttgtagagatctttcatctccctggttagctgtgttactaggtattttatacttttcgtggctatcgtgaatgagattgcattattgacttggctctcagcttggatgttattggtgtatggaaatgctactgatttttgtacattaatttttcatcctgaaactttcctgaagttgtttatttgatctaggagcctttgggaagagactgtggggttttgttttctaggtataaaatcatatcattttcaaagagagatagtttgacttcctctcttcgtatttggatgccttttatttctttctcctgcctggttgctctggctaggacttccagcattatgttgagtaggagtggtaagagtgagcacccttgtttcgtttcagttcttagggagaatgctttcatcttttgcctcctcagtatgatgttggctgtgagttggttatagatggctcttatgctttggcctaatttgttgagggtttttaacatgaagagatgttgaattttattgaaagccttttccgcatcttaattaagatgatcatgtggttttttgtttttagttctgtttatgtgatgaatcacatctattgatatgtatatgttgaaccaaccttgcatcctaggaataaagcctacttgatcatggtggattagctttttggatgtgctgctgggttcaatttgctagtattttgttgaggatttttgtgtctatattcatcagggatgttagcttaaagttttcttttttcattgtgtctctgccagattttgatagacagatagatatttcttgtgaattgttacaaatgcaagagaagaaaacttcatccaaacaaggcagattgcatacaaatatttctacaatgacctctatttatctagataaaagttttctaattctacaagactctagaatacaacttcaaatagaggctaggtgtgatagctcatgcctgtaatcccagaaatttgggagaccaaggtggaaggattgcttgaagctagtagttcaagatccacctaggcagcaaagtgagaccctgtccctacaaaatatttttaaaaattagctggtcaggtgatacacatctgtactccaagctactgaggaggctgaggaagggatcacttgagcccagtagttcaaggctgcagtgagctatgatcatgccactgcacgccagcctgggtgacagggcaagaccctatttttttttaattgaatacaagtacctttgaacataccaaatataattttatatctcttatttcaaagtgaagtctagataatctcacgtataagcatttttttaaacatatagcagatctctagagatggtgtttatctgattttcaaaccctggcatttagaaaaaacaaattaataaagactaaaggatgaggtaggcattgagatttctagaactattaataggtttccccttctaggaaggaaggtgaaaaaagtttcaaaaatagaaacgaagtgtaatcactgtacatttgtaaattgttaaaaaagaaaacattggaaggccaaggcgggcagattgcttgagctcacgagttcaagaccagcctgggtgacatggtggaaccctgtgtctactaaaatacaaaaaattagccaggtgtggtggcatgcacctgtagtcccagctacttgggaggctaagccaggagaattgcttgaacctgggagagttaggttgcagtgagccgcgatcatgccactgcactacagcccgggcaacagagcctgaccccgtctccaaaaacacaaaaacaaaaacaaaaaaaacacacacaaagaagaaagaagtatatagtattttagatttacatcactaatggtgaacacttagagtgttttgttaagtctagtggtaaactttatgaaagggcaaatttggaggtctagatttcagaaaagtgattgaagaactttaggactttcatcttaactcagtatcttcaaatttcaataaaaacaaaacaaaaacaacaaaaagtcacacatatattaaaattaatagtcacctagaatagcatagaataaaattactatgaccttgtgaaaagaaattgtcagatcaatgtaattttcttttgagttgaagcaaaatgtcatgttgatcaagaaaaaaataatggataccacttatctgtgctttaagaaggtatttgcatatctatacatgtatatgttcttataaaaaacatgatctctcaggctgggcgcagtggctcacgcctgtaatcccagcactttgggaggccgaggtgggtggatcacgaggtcaggagttcaagaccagcctggccaacatggtgaaaccctgtctctactaaaaatacaaaaattagctgggtgtggtggtgggtgcctgtaatcccagctactcgggaagctgaagcagagaattgtttgaaccagggaggcggagcttgcagtgagccgaattcacaccactgcactccagcctgggcgacagagcgagactctgtaacaacaaccaaaaaaaaaagtgatttttcatccctgatttccaactttcatatcagaattatggactaccatatgaatgaaagaaattgaactttcagtgtcagttgatagtaacaatagacattgactctcaaaagtcttctgtggagtcaataactctttgagagaatttgcattttattaaatacttacatttgtataatttaaaaagaatatagtgtgaatgtttgtaagacatgtatttaacatgaatccaaaactggagtgggacattatgaattcttgaaaactttagaataaatctgggcctaattttctgcaattattcatctgtatcatattgcttttaggggagggttcaagtggttcaaggtaagtaatgatgattttatgacatcctggaaaaatatattaattaccatttatctaaattaatctaaagactattaccatttaatagtttttcatgctgggtattgacattaaatataaattttaagtgaaactgatattaatagctctgaggaatgtataaataggaaacagaataaccttgaaacctttaggaattggcccatcaaggcaagtgagactctagtgtcaagtttggttagcgtgtagtatattttgaaccaagaacaaactatacaaataacaggatggcagagaagctaattagtcacaaatttggtagaaccaataaggctcttttatttaacaggcatcgttgtttctgattgatagcaggaagaacaggagaatcatgggatcatgggatatttttatatttaaagatcagttttattgtttcaatccccctttgttaaaatgtcaaactggcttgtacaatgacaaaggctaaataaaggtattatattactaaaaaacttgacacagtaattcgtactaagggaaatgtatacaaaaatcagacatcatctttttactgttcttatcaccattattctattacagtttctaccctaaggagattagtgaagttgggcagaaattagaagggagcaaaagaggaatacaaataattatatcatacctatgggttaaaatattgaaaatttttcagcttggaaaagagaaaactaaagagagacataataactgccttcaattgtatggaggtttgtcacaaggagggtacgtaattgaatttttatccctatggaaagataaatcatttaaaatgggtataaactgtagcaatggggagcttatttgtttgttttctatttccaaaaattatttgatctgacttacaaaatcaaatacaatataaagcagaataataaagaccaaatgatctaaaaggagtggtgaaatagatgttgccaaattcagaagtgtaactgcaatttttgtttgatcctgattttggcattgtgtttttaacagctgaaggggaagggtaggagcacatggagggttacatagatagatcccatagactacacaggaaaggagcacactgcccatctctgatagccctgtaccctcaagagtataactgagcatcgttgaagtttaataggtcctttggtgtttggttgtttggttgattggtatttaatgatcttttgttgttgttaaattctattctactccatgcgtagcaactaaattattagaagatgaaactgctagtaagatgccaactgaatagaactttctggtatttttatcatatccaacttattttctgcatttggccctactttgaaacatctaaaatgctagatatttttatactaagattctttgaattttggagtgcaacattcagaatgttattccttatttctgccaagagattatataatgacatataaaactgtgactttatgtggaaaataaatttgactcaatttaatattctgggcacaacttactatcaactacactaaaacttgttctgtctggcagatattctctggggtctaaattgatcatttaaaaggacactttcaaccactcaactcattaagtggctcagtgattctgtttgcaagtagtccattccaacacgtctatcagtatacaattctcaaaattagtcgttctccaagggtcattccttgttttctcatttaatatttaaggtgtaataataatggctttctttttttcttatcagatgttttatccatccttcataacatagatctctggtatcccaacttggtatttgtccaagtacttgaaataatgttaaagatcatttttgtgtgtgtgtgtgtgtgaaagatttgaccgataaggattcttttagctattttcatgaaaaagtggaatgactcagtttctcaatgtgaaaacatattggggtcataagtgtttctaatgaaatatcagtcttgctgcctgaatttctggttttaaaacaagagcattgaactgtgaaagattagacccggatttaaatctcaaacttcctccaaactgtctgacaatggtcatcactttattaacttgtgctatttaactttgctgaacctccatttttttcttttgttttaaaacaaaagttaagaacatgttatgttcagtgtttttacattgtgcttttgtcagaacacttgtattcaaaacataaaggcacatttaagcgggtataagtaaaatggtttatttattataagaattcaggccatgcatggtggctcacgcctgtaatcccagcactttgggaggccgaggcgggtggatcgtgaggtcaggaggttgagaccatcctagctaacacggtgaaaccccatctctgctaaaaataaaaataaaaaaattagctgggcgtggtggcaggcaactgtagtcccagctactcaggaggttgaggcaggagaatggcgtgaacctgggaggtggagcttgcagtgagcccagatcacgccactgcactccagcctgggcgacagagtgagactccatctcaaaggaaaaaaaaaaagaagaattcaactgaaaatcccataggccaaaacccaagtaagccataaagagattaaactggaatgagaagtccagaaacatatcaacacagcctacattctttctgaatgcttgcatggctactgttatttctgttttttttttctgctttggccgatatcctctgcttggtcatggccagacatagcttcctcatcctcaactctaggtcatgcagtgcatcttctcataacattctgactcactcactcttacttcatttaaacatcacccagaaagcaaattctattgtttcagttaagcctatagatgagtgccccgtgatcagcgtcctcataaaacctaccaagctgtggccatgggaaaggggtgaaagagtcacatggtataaacatagtttatactttcagtatgggttacatggaggacaatttcaaaaaaggagtgagggctgagttggcacctatcatgtgttattataaaaattattcccattttataaatgatagaattgaagctaagcaaggccaaggtactattttaatatcacagttttgttaaggactacaaccaaattttgaacctgactattcttattctaagtttaatgatcttatcacaaaacttacctggttgagaaaataaatctccatgtaagaaatgattttttcctacctgagcatggtggctcatgcctttaatcccagtgactcccgatgctgaggcagaaggatcacttgaggccaggagttcaagactagcctaggcaacatagcgagacctcatctgtacgaaacaattaaaaataaacccaaaagatatgacctgttctaacatttaaattaattgaattatggatgcatctttaatcaacaaaccaatacctgcatgaatcgactcagtcccttaggtaccaaaagcttgcttttttatatttgtaatggatgcttttcctagaccattctctaaaacagtgtttctcaaaatttgcccattcattaactatgagtgctacatcctgatcacctggacaagcagtttaaacacagattctaggtccaccttagatctctgaaacaaaatcttgaggtgggaccttggactatgtgttttcaaaaagatctccacatgatttttatgaatgcaatggtctatattttcaaagtgtagtctctactagataaacagaaagcaatatgccatattatttaagttctccacaaagacgccttcgcttaattaaaatttggtattacattcttggattttaaagaaaaaaatattatctgaatgaagctctaaacagttgttttatggctacatgttttagtttccttagtttgatgataacacttgtgttagaatgagatgggtgggaaggacagtgacatttgcccttcctatagcccgtgcactgagcaggtgacctaggataaggcattgatcatgaattcagttattcattcattcaaaaaaaaattactgagcacactgtggcaaacattttggtttcttcaatatgttgcatagaatgattatgcatacaattctagtggcgtggggaaagaaacattaagcacaagacgtttagttgatttcattattgcactaaagtatttgcctttttcaaggctgaagttgacttctctgccttcctgagccatagggaaaagggtcttgtcttgcttatgcagccagcaagatgtatcggtttaagaaaagtgctgagtaatgcctgcaaatatagcaggcagtcagcctcttctctgcagcttggttcatgtcctttacccatgctatttaacccctgatgtttttatatccctatttctaaactcaaaatgaacctcaaactgaataaggcatacaataaatgtatccatattttctttattcaattcagtagcatctaaatccctcttgtgaggaccctctgctttggtcattagatagttaaaaagatttaaaattgctatatgtctagtttctaaaaattgctaaatgattttctaaggtaaacacctttccgtgtatccagtgcttaacagaattaatgttatgtgagttttcaaaaaaaagaaaggaaaaaaaggaaatctcttttttgtctcagccgacagcaagcagtgctgctccggaaagaaatgattttatttctagcctctctgcagcatctccctaccgcattagtatgttgctgcaaagctatccattgtgtaactttccccatcagtcagtcagctgtgtagttctctttcctatgaaatcgttatgccacaggagacaaaaataaaaatacaatgcaggttagttcattatatcctgacatctgtttcatgcagattgtgatgcaataaaatattagtaatttaaacagaatgtaattgtggtttgaaatcacttgggtaaatcgtgttattttaaaacaaatcttaggaaaatgaaatttaaactttgcactatttgattaggattaacaaacaagaatatgaataaaccaatagatataaaatattagactttagtacttagaatatgttttaagagtttgcttctagtataagttttaattaacaattattcattagctgaaaatttttgaggacctattaagtacctatcactcttctgggtaccatgggaggtgaaaagggggtttaaagtttgtggcgaatgtatagtagttacattttatgagaaaatgtctcatacctagtgactggtaaagacaataaaggctgtagaccctggtgactagtgaagaacctatggcctggcttctgcttaaagagagctcaatgttgcaaaattcctatttgccctttcacttttgctagaagtgtattgcatcacttgtaagattaaagggaaaatatacttattttgtttcccaaaagtttataggtttctgactttcacaaatgcttaagagtactcttctctttgttgttatggctgtccacgtgtagcagtttcatctttagaagtttaaattcttttctctttcttgctggatacaatggctcatgcctgtcatcccagcaatttgggaggctgaggcaagaggatcacttgaggccaggagttcaagaccacctgggcaacatagagagatactgcctgtacgaaagtttaaaaatcagctgggcatgctggtatgcatcccagctactcaggagcctgaggtgtgagtatcactcggggccagaagtttgaggctacagtgagccatgatctcatcactgcactccagcctgtgtgacagggcaataccctatatcaaaaaaaaaaaaaaaaaaaaaaaaaaaaggaaagaaggaaggaaggaaggaagataatttctttggtttgtataggacctacggagttaaagcgaagtgataaaataaaggaggagtccttaatgtgcaaagatgcactactcatatatttgaggataatcttacatcaatacttttaataatgaaagaaatgtgaaaatatgcttgccactggttttaacatttaccatcatccatgtttgaaaaataaaacccaacactggttcctctcatgagtatttaattgttcaagaaaaatcctagaatgagtgagttttttctgtcagtaccaccttacactctctacccccattccatctttttatatagtctcttcctggcacattgataattcattccatcagaaaatccccactaaaagtaattcatccatatgtattcttccactgaaattaacaggtcccagccagccccatcccctacctagtcaaccaaaaaaagaactcttacgccctctctctgattgattaacccactttgacagtgagaaatgcattttacattgagaagtaagtagtctcattgatgcataaacgactcatgtactcccagagatacttgtcttttaaaaggaagcgcttgctaactgaactgaaaatgctaattaattgaatttcaggaagcaggaaaataatttttttagcagagaagactttcttcatatatagggctgctacatttggaaactaaacatacaaactgtccagttatatttgactttcagataaacaatgaataatgtttactagcagtgggccccaaatatagacaatgagaacacatggacacagggaagggaatatcacacactggggcctatcgaggggtgggggcctaggggagggataggagaaatactcaatgtagatgacaggttgatgggtgcagcaaaccaccaaggcacgtgtatacctatgtaacaaacctgcaagttctgcacgtgtatcccagaacttaaagtatagtaaatataaaacaaattgtatgaggtatgcttatgctttaagaaatcagttatctgaaattcaaatttaactgtgtggcatgtattttttctggcaaccctgttcagatatcttaaatcattatggtggttactcatatcctccatgtcataatgctgaccttgggtctccctacttccaatctgccagtccagcccctttggacatcactgtttcctttacgcaacactctacctagagaacaacaacagttgtcgcaacaaatcaagtactcttctaggccaacttggtaacattctaaaacaataatgccctacctagcccacgggctttgggactttactgggggtgaatgtagggtagcaggtgagatatatttgggaatttaaacaaaagaaaatataatttgagcataggctttagctgactgtaataatagtatttaaattatttataaggttttaacaaagcatataattgaacaatttcagctgccacctgctattgaggataacaaaaaggaaaattttctcagcacttaagaaatgttagaaaacatattgatatgaaagagtagaaatgaatccaaaaaagcatgcatttttttctttagcaatttttgttttaactatatctttttccagttcttcatcattgacacctgaaaataggcattggcaccacaaaaatggttagatggagagaatgcaggacatgcattgaactttatattccattgtcttacatgtttatcaacattcactttgatgtaccaaaactatctttaaatgagatgcacattttaatgtacatctagattagagaaaaatcactctggtctgataactttatgggattgtgaatacaagtgatgtgatgggtggttgaccaattattttaaaaatggtttagtgacaattcaagattgtgttgtagctcatacccttacacacacacacacacacacacacacacaaacacacagattgtgggattgacagagatgttcagttttcaaagtcaatgtttcagtgttcaacctccattttcttctactctgggacttaaaaaaatgaatctgttaaaatcaggaatacctaaatttccaagtaaagatccaagaagactaaagcctaaagtctatttcataaaggagcttctaaaatcaatttggttactttgcaggattctcaatattattattctctatttgccaacttcatagtctccacatctctaaccagtgccttgcacattgtctatattcaataaatattaaagaaatgaacaaaattgactgtatagaccatgtttcttagtccatttagtattgctataaaagaatatctgaggctgggtaatttttttttttaaaaagaggtttacttgacttatggttcttcagactgtacaagaagcatggcaccagaatcagcttctattgagggcctcaggtgacttcccctcatgacagaaggcaagggcagcctgtgtggggtagagaccacatggccagagaggaaacaagagacagggtggggtgccaggctttttttctgagatggagttttgctcttgttgcccaggctagagtgcaatggcatgctcttggctcaccgcaacctctccctcccagcttcccaggttcaagcgattctcctgcctcatcctcccaagtagctgggattataggcatgcaccaccatgcccagctaattttgtgtttttagtagagacagggtttctccacgttggttagcctggtctcaaactcccaacctcaggtgatccacccacctcagcctcccaaagtcctgggattacaggtgtgagccaccgtgccaggctgctctttttttttttttttcaaccagttctcatgagaactaacagagcaaggactcactcgttacagtgagaatgaggcaaaaaccattcatgagggatccacccatgacccaaacacttcccattaggccccacctccaacattaggaatcaaatttcaacatgagatttgatggcgacaaaccatatccaaagtatagcaccaagtatcatacacctagacagaaatagacttggctcaatgtcacatctgctgtgacagatgtgctggacatctggtagtgtccactctatacaaatctgtgataatcatcagctgctgagctctcaaacaagacgaaactgtataataatccctagagggtctctttaacccagaccagtataccacaaaaggaatatagtgagaatgactgaattcacatgacagactgaaagcaaacttaagtagacgtttatatgattatcacctgaagaatgatgaggttcataaatttggaaaggagagctttatttcttataaagggctgcagcctgcagagtgaccttctgacaggttgggaagcataacttccagccagaagccagaaacagacacttcaagggagggaaaaaggaaacagaaatttatgctaagcacggtggccaaatatatatgttcaataagttataggaggagtcatgaatatttatgagaggagaagcatgcacatcctcaactgagcttcatgcccctttgtgggatccatgtggaaaaaatggcgacattagcatgatccgagggtagagttttcggccctctgacattaaaaggtgaagcagaggacacaaaaatccttactgcacattctcagtggaatggctagaatcattccctagtgggtggtctcttatgaggcaccaatggagggaaagtgtcaggtggttggtccatgtcagtgggggagtcttttgaaagggctgatttctgtttagcccttagggaagaaagcctcatagtggttagtgagggaggggttataaggaggtatgtctgactccctgatccaccatggctgagaattcagtcttcaaggttactctgggatccttttggccaggagaaggtcaattcagtcagggggcttagaattttattttcagtttacatgataaattaagcataattttatatcataaatgataaataacatacagaaaatttaatatactgagtttctgaatcaggaaattatctctgcctttcatctttcaagacctattttctgtaagttctttcagctttctctataccaaaatggttcttctctgaacaataatccatagtaaccattgcagataatatgcctttgcttagacttgttctatgtctagattttatatatacagaatctgaaccaaatgaattctgcagctctgatacttctagtctcaatttttcataactcagggaggttccatttgtcttcaggttatttggaaaagtgaaagtgtcaaacacctgatactcattccccagggtagttaatttgtgctcaacactctcctctccccgttcctggatctgtttctctttcccctgcagtttttctctgcttcagccccgctgcccgtgggttctatgctgtatctctccatacagcaactatgcctggacagttttgctttgtgttgaggtggtttcataagaatgcttttgagcagaagagtatttttaaattgagtttatgctaaagagaaacccctctgagcagaattccacacagaattctgcaggatatttcctgcataacaccataaacatccttctggctgcagcagctcaagtatttctgttgaaccatttcacaccctgagctaactaacattcagagaatgaaaggtgaaagtcttaaaacataaattaaataactatgatttcttaataacactaatgactaaacattccacatagatcctaccaaaggagggtattgtatgtctcccaggaacagagtctaatcataccattgttgtgctggaacaccattgagtccaatagggatggcatcatggccaagagactaaagaagagacttgaagccagcaagggagacataggatttatctaggactcatatacaggggtggtccagtggcagtgggctggatgggagaaccactaatgtttgtaaaaagcatgcagtttatatagcattttcacttagcactctccacctagcaacattcatttaatccaaacaaagggcttcatccactgtatggcccacattctgaggaatggaccaggctttggaaatccttaataataaggagcaaatttccaggttggccacttccagccagatttcttacctcagacttccaaacacacattctttttagaccacagagtcattctcagggtacccttaaattattgctgtcaggtgcgtctgccatacaaccatgagtcctgaaaggatttgcacactgaaaacactgcattattttaccaaaatggttatcaaagtagatatttccaaagaaggaatgtaagcatccttcctcccaacccccaaccagcattttgtgttaaaatgctagtgttggcatctttttccttcaaagggaattgtaccaagcctgattttttctcccattattgccccacagcaataaaaagacaattgctgactcaggcactatttcctctggctgctacttatagctacataactcctggctttaccagcaccataggcaaaaatgacctgcattgtctgagagagcagcaagaagaatggcattcattctgtctccatctttgtgggtttacattaagttacttctagaccatggtttttgaatgaaatagaatggacttgaagtgtctacaaaggagaggcacagtccagagtgggaaggggtggggagaggacagcaacggaagtgagatggaggctgagcaaaaaaaaaaaaaaaaagaaaattgagaataaaggagagctgggagagaaaagatgaacatcgagaaaggggaagatgaatagactggccattaggctttctcttcgagtaatccactttgtgcaaaacctgccatatacaacttggatataggcagtgcctctctcattgctagctaaacagccctgggaggcccacactgggctttaagtgcctatcacctcacacttggtatctcaaaatctgcaaccacaatcacagtcacgaggattagacttcactctctacatcctcccaaatctctgtcgagtgaccactcacccacacaataagattacttattttctaacaggaaaactttactaaaagaggttaacttaaataatttacttacaatgacagtcattactatattcttgatataaactaatgacatttgttcaaaggaattcccttaaattattctgactatgatcgtctagaagagatcctaaatttcacatgatttattatgtgaactatccatggtcttactctttaatgacaatcttctctgtaaggaaaaaaatgaaattaatcatcctaatgatactgatgtgtttcatgagaaaactacaggcagagcctaataaactatggcagatctgaatctcaggcaaaaactatgtactgtatttctatgtattgtatgtagattgaatgaattttttgcctgagatctgaatctcaggcaaaaactatgtattgtatttctatgtattgtatgtagattgaatgaattttttacttcttagtttattattagggtgtcttgaaaaacacccctggagtatacaaatgtagatacagacatatgttagatatctgaccttattttaactgcagtttgcataaggcatgaaaaactaagggtagataatgaagttatttttaaatgtaaaagttttaaacatatggctgaaatatgttgttttagttaaccccaacctactaaaaattggcttattgagaaatcaaatgaaatatttttgtaattataattacaccaaatcaaattatttctagaaaagaaatttataaaacaatactttctaggtttgggatttctatgtaaaaaccaatttctttcttggctgctaaaaaatagttatgtgagatcacaacagtaagaataacattttacctagttatttttattattattggcagtaacattcttttgtaaagtaggtggcaagaacactacaaaacgaactgaaacacttcacaaattgtcgtgcccagatggtttatgtccccagaatagtaatagctctttacaaggagatggcaagcattttggcagaagtctttttggtttctcttcagtatggatattaaactactttatagacagaattgaagatatataatttttctccacatcagattatatattataaggtggtgaagatatataaatgttgcacaactatattgaactttggagttacagataaattatataaagtcatctgctcagttagtaactagaaataatccagtttagcaatacataaaacataacggaagtaaaacataaattgacggtggaggtatagttcagcaggattaaaacctgcatcatatgattctaaacttgaatattacaatcatctttttaaattttggagtctcccatttttcaaaattttgaagtctccatttttgccagaatgctttatttactgtatttgttttgggtctgtccaagtaatataaattccttggagagacctagatcaattagagtagataaatactattttaacacagctacttatattttcatatattttatttagctttaaaagaatatttcataactattaggacctggcagacactggtttgggagttagaaaataaaagttctgatttaagtcccaccattaataagctgcgtaacctgggacaaatgacatatttattttgaaagtaggaagcacataagttctaaacaaagaaattgcccatttttctttgattcagtttgttttctattaaatgagaggaatagactaatctctgttttttaaatctttgccatttattggttttgatttacttatctttgtctaattctcttaaaataacttactcaacctttcagaagtccagaggtcaaggtaaactaggtcttgtctgcctgaaagcctgtattatagactaacactgttccacatcaacaacaaaatactatcacattaagtactatatatattcttgtctgtgaataaaccataagagctgcactttatattcagttcactaatcaattggttagtaatttttttccctgtaaatcacttctagggtcagataaggcaaaaaaataatagcaattattctaatagatcataacaatagcattggaaactgggaggagaaaatgagagaattgtctcaccaggttgtagggagagacgggggagtgaggagggggaatttcttttaggctttaaaaacaacatagaatttaaggacattattgaaccaaaaaatctcaagacattaccttagttatggtatttcttgcataaatacacaatggcatcagagtgtgaagttgtggatgctgggtgtctctcggggatgggaaacactaaatttcattcatctttctcaggttctgaacaaagaaaaaatattcagaggactaagacagatatcacctttttatctcacagaagtttgtggagagtatagctttgtgtgaaagcccaaaagcccgttaaccaaacagatctaaccacagaggcccaagcagtcacacagagctgccctccaaaggaagaaactacataatgatttacttataaaaggccagtttcttcgggtacaaagcatttataaggttgcctttacagttaagacttctgtgtgaaatgccacagggaaaatgaaatacttcattgtgagctatcgtacatatttgtttgactggagaaaagcagatgcccaagggagtttaactgtaaggcttcatgggttaggattactttaaataaagctcctccatctgcactttgagggtcaccaaagccatatggtttaccactcccagtcacctcaagtataaacatcttttggctgtgataaatgcctcctcaagtccagaacgtaatacatgtgtcctcttctacgggaaacagagatatataatgcccagaagcaaaaacctcatctagtactagaacatttatgataagtaatgaattagtaaagtcttagaaatgacactgaatattatcagtattaactttctgatcttgtaaagtctcccgagaaggtaatctgttaattataatgctacagatttacctccctctttttctttcagttagatattaccagatgatattatatctttatttattatttgtatattctaacaaatttttccttataattcttttgtccacgttatttgatattggtcatgttattgctattactttactatttctttccactcaaaatttccacttcattttcttacaatcttttttttcccccatgatctctcacttccatttcatgttcttttggattatttttttcctgtcttctttaggattgcttatctaattgaattccacttttaatgtatttttcttgtcttccaaagaatcattcttcttccagttttctattgcccactactctacttatttccaatattttttaaaattccttcagatttgaagtttgctaacatgcactttgttactttttcttcctagctatggtttcttagttctcttcttaattttattttgtccaaatgcataaccataatcatcttgaaaaggcctctctctttgaagtcttctcttgttaggaaagtttcattgtcttacctcttttgaaaggagcaaggtctcctctatgtaaccaaatatttaaatgctggtttttatgaaaagagaaagctgtaagccaaaactgcagattctatgaggttactaccccgtatctagtgacatgtattttcataaattaggacaattaagtcttctgttataaatttttagaataaagaggtgaaatctcctttgtaagtgtaaatggaaaattcatgatttatttctgtattttaatagaataagtacagatttcaaatgtaatttagaacaatttttcatattactaaaaaatattaatattgaatgacatctgacagttttttaggtatttcataattaaccttatgagatttttaatgagttttattcttataattaatataacataatttatttttaggtagcatttgaatagaagatctacttagagttaaaaaaatactttttctagtatcagtatgatttcattataatatgggttatattgcttacatatgaatataattcctgtatctaactaatttataattatatataatacgtttgaactgatcatatttgtcagtgtagaattcatgtcttctactttcttggttgtttatttctccagtaaatgatagctagtgaccagggagattttctttagagagcttttctcaaatgcagtatttctggagaataggaaggcttttagtaactgtttctgtccattcacacaacttcatggacaataacatcaagtgtggcactctgaaagacggtgattgtcgtaatgatcacatatgttaaaatatacctatatatgatatctaaacatatacatattaaggaaagtgctaaaacagtaaaatgaaaaggatgaaaccgaattgatggaaaaagacatactagataagtgcaaataagtagaaattaaagtcattatatgctatgagacaaagttgtctttaaagggaagaaactacagtaagataaacaagggccatttaaggaagtacagggttcaattcactccaaagatctgatcataagtgttatctacacatcaaacaataccgcattggaattcatagaacaaaaatgacagaaaccacaataaataaaaacacattaaatagacattaatttgcctctcccaacttggaacagtcaagtagaaaaaaaatatgtacagacatagaaggtctacataagataagaaataagatcaatataattgaggcataatgaactctactgctttaaaataaagaataagtttctttttaatgttcttagaaaagtcattttaaaaacaacctctattaggataaaaataaatcacaataaattccaagaaacagaaatggtacgaactacattatcagagcatagggtaataaaactaaacataaatttaaaacttagaaggaaaatctatcatttgaaaaatttaaacactttcttttaaatagttcttgcatcagtgaggactttgaaaccaaaattcattttaagaattttctggttattcttgtttgcttatttttccacatgaagtctcaaatagatttctctagttatatgaattttgtgattatttttcaaaggctgcatttaatttattaatttagggaaaattaatatctttatgatatagcattcctatctaataataggatataactttccatccatttatatttacttttggtttattcaaagcttttaaaaaatgcttacattgtatttagaaacatttcttccattgtactttttctctttgaaatagactagttttacagtagttttagattcacagcaaaattaagccaaaaatatagagtttcccctttctctacacacgcagagcctcccccaactatcaatatctcgcaccagagtagcacatatgtattactgtaaaaataatctatttagaagagaaaaaatacaatggaagaaaattaatttaggaaaaaaattaattttttccctaaattaacaaattaaacgcagttcaaatatacctgtattgtatataggtatattttaacatatgtgctatattatatgtattagaatcaaagtcctctttgattcaagagctattttagagacagtgtttaggtattgtatatagttacaactgatgaacccaatttgatatatcataatcacccaaagtccatagtttacattataattcaatcttggtattgtacattctatgggtttgcacaaatgtataatgacatgtgtccactattacagtgtcatgcaaagtattttcactgccctggcaatcactgatctttttattgtctctgtagttttgtcttttccataatgtcatatagttggaatcatactgtatgtccattttagattgcttctttcaattagtaatatgtatttaaagtttctccatgtcttttcatggcttgatagctcatttcctttaatgctgagtaatattccattgtctggatgtaccacaggttatttatccattcacctactgaaggacatcttggttgcttccaggtttgggcaattatgaataaggctgctgtatacatccgtgtgcaggattttgtgtggacataagttttcaactcctttggttaaatcctaaggtatgcaattgctggatcatatggtaagagtatgtttggtttttaagaaactgctaaactgtcttccaagttgctgtaccattttgcttgcccaccagcaatgaatgtgagcttctattgctccatatcctcatcagcatttaatgttgttagtgttctggacttcgaccattctaatgagggtgtagtgctatcttattgttttaatttgcatttcactaatgacatatgatggatgtggggcatcttcttctcatatgcttatttgccatctgtgtgtcttctttggtgaagtgtctgttcaggtctttggcccattttttattcagattgttcattttcttattgttgagctttaataattttttgcatgtttggggtaacagtcctttatcagacatgtcttttgcaaatatttttcttagtatgtggcttgccttcctattctcttgatagtatctttcacagagcaaaatttttcattttaatgatatcagattgtcaattcttttttttcatggatcgtgcctttggtgttatatctaaaaagtcatcacctgagttctggttccaaaatggcagtgaagaagcaagctggcacaattcctcctcaccatcactcctagaaaaccaaaaacaaatatatagcactgagaatatcaccagaaatattccagaactcaaatatgaagatgagacagttccaagaaaaacagagaactaaaaagttatcaacaaatttagtcaactaggttttctccaatattatcttctagtagttttttagttctgcattttacatttagatttgtgatccattttgaattattttttgtgaaaggcataaggtctaggttcattttttttttttgcatttggatgtctagttattccagcaatacatgttgaaaagactatcttttcttcattttattaccttgcttctttattacagatcagttggctgtaattatgtgggccttcttccacactcactatcctattccattgatccacttatctattcttttgtcagtaccacactgtattgattactgcagctttacagtaagtcttaaagttgggttagtgtcagtcctccaactttgttcttcttcaacattgtgttggctcttttgggttttttgcctttccaaataaacttcaaaatcagtttatcaatatccacaaataactgctgggattttgacagaaattaaattaaacctttagttcaagttgggaagaactagtgtctttgatatattgaacactcctattcaaagacatggactgtctctgcatttatttagttgttctttgatctctacctcactccatatagaaaataaattccaaatagataaaatatttaaacttataacattaaaccaccaaaatactaaaaatacaagagggaaaggtgatacagatgcatgtgtgtgtatgtatatattttatatcctttttcctaccccttactgcccatctctctggatgcctttctaagcattatacagtatccagaagccaaagaagaattagataatcacctaacaattttaacatttttaattaaatcttttaaaatctgtagcacaaagcaccataaagtcaaaaaatatacatttttaaaagaccacacatcaaaaaatcaagtggctaatattttgtcttaaaagatgctatagattgaaaaaaatagaaggaaaaaatgggctgtttttaaataagcagttgcaggaaagaaaataaaaaataattcttaagtataagaaaaatatattccacttttctcatagtaagacaaatgcaaattaaaattataatatgctctcatctttgtccctgtcagattggaaatatcaaaaatatgataacatattatattggtgaggataaataggcactctgttacattgctgtcaggagaataagttcatacaaactccatagaaagtagttttgcagtaactatcataaataaacattctgtacaaagccaagtctacctttaaaaattaattttataaatatatccacatatatttgaaagtatgtgtgtaaaaatgtattacttgcaactttattcaatattagctaaagattggaaacaacccaaatactcacattcagggaattggttaaataaattatggcacataacatgcaatggaaacccatgtagccagtaataggtacgagtcaaatctataaaaattaagataaatgaactctaatatacattttaagtaaaaaatgctggtgtaaaacagtttgtataataagattccatttgaatatgtattttaaaatagaatatgtatacatacactcatgttctagcatatacctattgaatacctggaaatatatatgggagataagtagtagtagttgcctctaggaaggggaactgggcctggggaaacaaggtaaaaaggagatattatactgcattttcttttagatatttgcatttatatcatttacatatattttctatcaaaaagctatttaaaaataaaaactatatatatacatcagaatattttatttcccttttgagaaaagttactatatttgttatccctaaacttttatttgcaaaaaataaatgttagtattttcctgatgccttgtaggggaaccagagtttgtagacagaacattcagttttcattgatttacagacaacctattcttgcaggtactaaataactgcaggttaagttctaagaaccgctgaaaacttcacttagtagactaagggtacaaatttaaacttgagtcctcccttcttttgatcatccactctgaaaaatatggttataaacctcacaacaatgagaacctccttgaaatttgaggtctctgtccctcacaaaataattatgcctgcaattttcttattgtagttcatatacaccaaagctataattaactgtaccatagcttgctgaccttaatgagttaatgcagtctccaaataaaattcatggccaagtggcagcttaggctctggaatattttggctcagtaatatctgtgaaatctgagctcatattaaatatgccttaaaacaatacatttgggatttggcgtctggcatcagatcaggtctgactctgctgtatggggttgacggttttgcctcaggccttcataatatggttagcactataggactatagaatcagcaagaatttcattattgcttcagtgaagaaaaacacttagtttctattgagtttatggcaccctgacttctttctgatcatttttcttgaaacaggagactcctgctgtctcctgcacctacagctatcttcttccacccccacctccatctagcaatttctttacagcctagttttcctctccttcttactcacataaatgacatttgtccaaccgtggactgtctttatctttatgtgttcaagtaagccaaccatgcatggctagtgaagtgagcaggacatagttccagttgtctcaaatcttagaagaggttaaagcccagtcaagacagcaataactatttgattggtcattaaggttggtcactgcaaactatcctgactatcttggccaggaatcacttgtcagacctagagggttagattttatgtcctctcagagacaattccttttcccctcatccttgttaaatgagctatcctttgcctttatacgcacagtctccatcttctgggtgtgtcacagactgaataactcattagtgatatagtgttaattagcctaatgtactttgattaaggccatatttgaaccacttttaaaactcatggcacagttcctgtatcagtaaagcacaagaattaataaataagtgatgcttaactaaactcaacacagaaaccatttgtgttaaaattttttctttagaaatcacctttcaatttaaggagaaaacagactttaaatcctctagctcatgtttcatgacaagaatttatttatattaacatctcttagtccactctttaaaatatctgtattccttttattttaggaatttcatatgcagaataaatggtaattaaaatgtgcaggatgacaagatggagcaaacagtgcttgtaccaccaggacctgacagcttcaacttcttcaccagagaatctcttgcggctattgaaagacgcattgcagaagaaaaggcaaagaatcccaaaccagacaaaaaagatgacgacgaaaatggcccaaagccaaatagtgacttggaagctggaaagaaccttccatttatttatggagacattcctccagagatggtgtcagagcccctggaggacctggacccctactatatcaataagaaagtgagtgttttttatcaggcatattttgctgctaattgcctactgcattccttggactgttgtagcaccaacacatgccaaattagcacaaaatcttaagtatccttctgtttaagaaatgaaacacatttgtgggtggtttatgcatatacatgagaaatgaattgattatatcataacatatgcaactgtcccaaatgcaccatgacaaataaaaagaggccaggtgcggtggctcaagcctgtaatcccagcactttgaggggccgaggcaggcagatcacgaggttaagagattgagaccatcctggccaacatggtgaaaccccttctctgctaaaatacaaaaaatttgctgggcgtggtggcacacgcatgtagtcccagtcactcaggaggctgaggcaggggaatcccttgttgaaccctggaggccgaggttgcagtgagccgagatgacgccactacactccagcctggagacagagcaagactgtgtcaaaaaaaaaaaaaaaaaaaagaaagaagagagggtgggagggaaggaaggaaggaaggaaggaaggaaagaaagaggcagctaatttaacaaattgacagattctctccacagattcgatttactatacaatttttttgtactttctgtacttggaaatacttggaaatctcaaaatcatgagttataaagactatacaaaatattagtactaatttttcatgcaaacaaatttgatgccacaagggtttgcaatttcaatgtcatgttataaacaacaaatcaattaatttcctgaagaaattttgttacctgtaaaataacatttttacataaactagaattttacaagttatttaatattttggtattaatgtactaatattggcaagaattaacaaaaatgtcataacctgaagaacctataaacaatatttgaatgcgtgcttttttcatatccatgcttgaaatgaatcttatgttaagcatccaaccgttcattatgactgtcatttcaccaaaccaaaacaaaaagcataaaattttttttaagattattgcattgattttaaattaaatgtatgacgttaggtgattcgtaacattttcttctttatcacttgacacaatgcatttgtgaatcttagtggaaaggtagggcacaaagattgtaattaagtaaatttttttgttggacctggaccttaaaataccccctaaacttttagggactctgtttctggcccagttctgtgtgaagttagtccttgccaaatgcatgcaaaagtttggcatttgtaatatgtgaatttgaggcagttttataaatcacttccgattgacagctacagtttcggaggaaagagcgtcacaaaaggttgactagccttaggttcagatttttttttaacttttcaggatatagtcagtttaagtataacatattttcccttttttttttttctttttgagacgcagtctcgctctgtggcccagactggagtgcagtggtgccatctcggctcactgcaagccccacctctcgggttcacgccattctcctgcctcagtctccccagtagctgggactacaggcgcctgccaccacgcccggctaattttctgtaattttagtagagacggggtttcaccatgttagccaggatggactcgatctcctgacctcgtgatccaccggcctcggcctcccaaagtgctaggattacaggcgtgagccactgcgcccggccagtattttcctttttttttttttttaaacattatacaactttaatgttacaccatctacaaatctaaattacatttaaaattatcagttgacagtggtactaggatttactttaggaatcactacatatttcccctttttaaaaactgatctattcattttacagtagaggaagggatggatcattttccatgtatttcattttcctctaactttgcttttgaacaccatattgtcaaatcttagttgataagagattattaatctcataactgccatttaagttatgagaaaagttgcactttattatttaatcaactctttggaaattaatgtatctgaaaagccaaagcccaaactaaacaaactacaaggactttatttgtataagaaaagtaaaaatgcagataatccaattgcctaaacattttaattcgtttaaaatgacttcggtattgaagtgaagactgatgtgttccaggcagaaattcattcacagtatagagtatgctactgtatttatagccattggatacttttagtttattcagaggctgctcttgggatatgttagtgggctccatcctcaacaggccttttgctacccccagacaccgggtcctcacctctttggtagcaatcaccatctaaaaattattaaagccacccagcatctatcccttaatcaaacagggaagaaatttagtatctctgctcctatgctgggtccttatttgtaaaataataaatgaatgttttgagaaagaccaaactaatgcatgttgacaaaggtagacattcttcatctggaaaccagaacaaccaatcaatcttttttttctttaattaaagagctttcagactgataaaagtgattgtctcgaggggatgtccctaaacaaaatggtccataattggtttataatgaattatatatagcaaaggatataaagacagatgtaaaacaaaattgtgcaaacattttcaaaatactcaaaagaaacatcttaaaactgagggtgaaaggccaactctgatgaagtgacagccagattcttgtgtcgaggaaacccttataaactttgttaggctcacgtctaaacttgctcttaacatcttctgttcttatcttcaaatgcacatggtatgaggaaagaaaagcattttggcattttggagcaaatcacagtgtgcaagtagaacaacctgataagggaaatattgttatcaggaaagagttttccccaaggtaaggtatactcatggcttttacattgaactgacagcaagcaaatcttcaaatgtaagtcattcaacagcaatgcacacgaagctttttgcagggctgaaatccttaaaaactaacatggtgtgcttagaacacatgattgagttatgtgtttgaaatttccttcttctgcatttttatgtcttaagacttttataagttgcctgtacacttttttctgcctttaattttcttttctaattggattatttcagtattgaaaaatatccttaaatggaattaatttgctctgactaaagttggaatgcttagcaaaatctgaaccttttaaaaataatgaatatttctttcaatattcgatgactaattttactttagtgactgggttatctgagattggctgggtgatcttcattaaaacaatgcggtacacatacacagtactcttgacacagctaaatggtcaaacagtggaaatgtcaccagggaaaatgtttattaggacgagattttccactaatgctgatactgggggtgtggattagatttgcctgagtgaaatggaatatgcagttagactagtgatttccctaaagttggactctagtacaatagttaatgtgtcatttgcatcagtatacaaagactctggtttctttctcaactatatggaatagacaaaacaagccaattgtaaaaatatttgcagaatccattccttatgttatattttatgttaaagtgcagtagtgtacatgcaaggaatttatgtgaatagaaaaaacacaaccaccacactgaagctctctgtaatcttttacaaaggcagtgtcagtgagcttattaaaatgtcactgctgagagtatattttccaatggcatatgcccacatatttttatcctctttgtcccagtttaagatgtgcaaattatgtaatgttcaaatattctactaaaattgttaaagcagtttaatccatgttcagtaatattgtagtagtaactaaagaaatagtagcatctatgcatcatgaacattcctgatgcatagaagcattagaaggtttttagatcctcagatgttttaagccttcagagttccaggttaaaaactcaggggaaaaaaatgctatcataatatggtgacagtatttttcatatcatgttagctctgactcagtggtctttagaacatgattccagattggtttccctttgtttgtttatttactttagctgtgtagcaaggcacattttagcttgtgaacacacctttttttccctcacgggactttttttcacagtttcctttcatagcttgggctgattttgtaccatttggccctacattcaaattctttacccactctttattacagaaaatgtcttccttctcatgttcttgttaaaattacagacgaatcattattaccatggaagaaaatatcattttaacaatgtgacagtttactggaaatagaatgagacattttagatctgtagtaaaaatggatgtttgttaattatggagtgcagaaatgcattcatttttaaaaagtcctatggatcatttaaaagtaacttattctctcttgctatcaactgtcctgaaaagatgcacactccctttttcttgggctccatgagaagtcatatatgaatttgtgatttcaaattcatgtttggtctatcactgccaaaggagtttttagttgttaaattgggtggagagagtttgttttgtttttaattggaattatggagtttttcttgcaaaagtaattaacgggaaatcagaaaagaggatgattattaaaagcttataatttcacgaattgtcatatgggcagtccccagtgtgtagctgttctttgcttatcatcagctcctgtaaaactaaaagtcacccagactctcccttacatccaggaccctgtagttgacttcccaatctttctcttccctatgcactatttcttccttgtgcttctttttcctttgtcacctccctgtctctgtctcagaaacagtcccaagatggtgatgttgatcaataaaatgatgcttggcatttttagagtatctgccatatctataggagatccttcaactgaaagtttccaaaacccaacagaaacaacttttggggaaaaataaaggaaatgtgtctagtgaatctggttttaatatcaaaatacccagtacctcaaacaatgtcatgagggtactccttttccatggtcagctctgctgtcacccatgctggcttcatttgcaggctggctcttccacaagatggcagaaatagccaccagtggtgctaaactaacatcctacagccttgtaactactatcttctgctaaaacaagaaagaagaaagaaaaaaggcccaggtttccttcaaaagctctagcagttgtcctagaattgagtctaattaggtcacatggcctcctctgaaccactcactttggctagtggtatgtgatggtctccttggtatgggatggtctctgtcatatactaacctgtgttgccaaggggtgggtcagctccaccaagccacatgggaagacagtggggcagagatttactccaaaaggaagagaagaggaactgttagaaaaggtgtcctaagcaggcaaaaaaaaaaaaaaaagctatgtactctacatgctatatataatatcagtataattactgttcttttttaatccacagattctttcaagatagctcttgtctttatttaaaaataataaaactgagtttaaataacttgcctaagactagttttaaaactagaccagtgagtttccatggcccattgccatgttagtttggatttgcagtcatagcactaatcacagcagtggaaaaaaaaaaaagagaagtcagtgatggaatctaaataagcctatagctgtccttcctgtttcctactcatgccattttgcaagatgtgattctggtctcccaggccggcagtatttcccgaacccttactggtcatttcaacacttggccatttcctgcctttgtaaaaccttatttatttattattattattcatttttatcaacatcaccatcttgggactgtttctgagacagagacagggaggtgacaaaggaaaaactaaaatcttagacactcagtgatctagattagcttctaaaataattagaaattttttttcccactaaattccagtagggtgataagcacctattttcaaagaggatcaattcaggaaatttaaattgtgtgcctctataaggaaatggcatttaaattgggatctgaaggttaaaaaggaggagggagaggagaatcttccaaggaaagagaacagcatagaataagacatataatcaagctgacctgtaataggtaagaagagaataaggtgaggttggggaggtagacctggggctagataaaggggatctttcagtacatcttaaagagtttgaaggttatcttcaaagcaaaatgaattcccaacaagtatttaggtacagcagtaacatggtccactttacattgttaaaaatcactcaacttctctatggagaaatttaggagttttatacttgatctagcattttgacaatggagatggagaataatggatagagtcagaattggttttggaggtgtttaggtgtcagacagaaggaagctgatggcctcattttcttagataggaagtttgagaagaaagatactgaacctgaaaattccaatactaaaattggccatgctttggagaaacagaaatgttcttatatgtgtatatttaagagttagaatacagagacgcattttaaatattttaatccttatatttttattgacactttagaattcactaagggcattgacatgttttatttcactttatcctcaaaataatcctaagattggtattagtataatcttctccattgagatggagaaattgaggggaatagtttgctcatagttctcacacagcaagcttgtaatcaagctgggctcaaaagtgttctttccagtcaaagaaaaattaactgaccatataatagtgtagcagacccatggtatgtacattctgatgatatagggctgaaaaatgtttcagctccagattttattctttttccttgttgttataatttcttctctctgctggagaagaggttgagggctctgcagccttggctgacaaaagcctacctaggcactttctagggaggcaccttctgcagagttatctcctccactggccccaaccctccacccagctaaagcataggaacaagcaattttacagactcttctctaggtacaaattcttctcttttgtgtgagcatatggcaacaatgtttaaaaactgactgtgaggcatggagtccacagacatgttttgttaaactaacaaaattatttataattttgaattattttctggcatttataaatcagaaaatctttcacacactcataaaattatacatctaaggattcctcttgaaatatgagttcaggcatcactgacttatatgcctaaaactggcaggtacctattgtcacttagcctctgtgggcattttagtttgtaatctgtggcttaaggaccacatctgtcattaagtgaaggctatatattaaagcttggtggcccacgggtaggcaagtgacacagattgttgtttagtctggttatcactggttggaaggaaaaaattgaatgagactaggagatgaaaaaatattaaatatggcatactctcttcagagtcaggtagaaagcctgcaagaaaacttttcatcccccagtgagccagaaaaggaagaaaagcttggcttgaactcacaggctatgacaaatgagaagggaagtaggtgagaccatttaaagtccttggggaaaaaatattatataccatggaattgacccagcataagaaatgtccccagagatatgtattatactaatggaatctcctgaccatctatgctgctcttcacacccaaaactttgaagcatctctcctcttgcaacatggctctaattctcccccttcatgctggaacctctttccaagccagcagcttagagctatgaaaaacttaatagcacttctgggtaggagctagagccagataattttcctggtctgacttccaggctatttcaaggacagaactctgccattttcagagtaacactttcttacacatagtgataaagtttctcagtgccattcattcagaattgtacttcattaacagtttgatagacctgtgggtctagaaatatatgtgtatctgtgagaatatatgttcacatttccaaacaattgacttccaaatgcatttctggagcacagctcatgtacaagttggaaattgcctgtttcaaactttgaagctaaaggataaatttaaccaaccagtagtatattctacattttgtgtattgttcatcatcatagctcaccttcctgtgttatttcttgtttttgccagtagatttactttaagagtaggaaagtgcaataaatttggagtcagtcctgttatttggcaatgtttcaataatgtttagatgaaacacaaagttacagcttatgtttaaactatgtactttgaagaatatggcccctagattgaaataaatgttaaggtaatggctatatttaaatgagaaaaagaaactggaaaaccatggcttgttaaattcaatgtccatcctgggaaaaaattgtaaacaaatcactttctataagcccagaaacaagaaaagattactagataataacaaatatagcttcataaatagcaatttctaccaaatcattataacataattattttcttagtaactattcagttagatcaaggggcaagatttcaatccacatgtacaacataatcattgataatttggccaatggtttgtgattttttacaaccattaggtaacaaacatattaacagccctgctatgacagaatcatctggattacttatttaaagtataaaaactaggtatcaaaatctgaccagctaaattggaatcacattacctctatgagctaagtacatttattctgttttcaagtgagataactgagtcacagaaagttaagaaacctgttccggatcacactgctggaaggcagcaaagttagcttttgaatcagaaatctaatttcagagtttgcacccttaacataagataaaacaaatcatacttatattttcataatgttgcttcccagattattaaactgttaattaccagggttattaccaatttttctatataacttccttcttgctttttctttaaaaccagaaatgatttttacatggcaaggattgctgaagaaggtatgagcttgctgaacaatggatggtttaagtttaggtctgtgctgcccaatatagcagagattaattagccttgtgtagctattgagtatttgaaatatgtaagtgtaactccatatttcaaagatctaagacttagtataaaaatatacatatctcaaaaattttttatatcaatttcattcccaaatgataataattcagatatgttgggttaaagaaaatactgttaaaattaatttcacctgctttgtttttcttttaatgtggctctcaggaaatttaaaatcataactgtagctcagatttgtagcttacattatatttctgttggaaagtgctggtcaaggtaaccttcatcaattcttctatattctattaaaacaaatagttgagcatctcctagtttataaatgtcttggtgtcataacctatgtatctttgttttctctttagaatgtagcacagggcattgcaaatattgtactaaacagttaatacatgtattctgaattgccatcaattgaaattaacaattggacctaaactaggtccctgctcatacataattaccaacttattgtatatatgcccaataaacttggtacctgtatatgaagacataagtgacaagctagaacaaccctattgtatgaatgttacattcctgcaaataagtctgtaaagtgatttttcatatataaaatctagttgttacctcagttacaatgccatgcttcaacatttgttttgaagcagaaaattatccacgtgttaaaatgatgttattaatttcaaacagttctatttctttgtagaactgcaattaaagcatttgttttggcactaaaatgaactgaaggacaaatattaagaatagtcatagatgtgcctgaattgtactaaaccacaaagtcttgctgcttgtaagtggagccagtcatgtcaatgttcctatgagccttgggtggtaaaaaggggtttgttttgggctagatactactgtataaaccttttctcctccaccaccaactttgaactgtttcttttttattcaaatgacttaatgcaataaaagttatcctgataagttgtattaatgaaatctttgttgaactaattagatttaaaggatgctaagatacttcactataataagctaaccaatacattcttttaaaaagtttttaaaaagtcacccaatttaatagttcataaatcttgattagcttaaagctacacaatatttgtttatacagtttaaggtacagcaatatcttagctagtctttgaactcttccctcttggagccctttcttatacgtatagcggggaaggcaaatatttatatatttgaaaactctagagctacttaagtatttgttgtaagcaaacagtatttccttcagactcttccctcccttcaatatcatcaatgccacttttgggagaaagctgtatctgagagtccttggaaacaagtatccttttattaattcttaacacttataaactgaatgatcggcttcttggctatgtaagcaattacaaggaggtaagatacagacagttgaggaaataaacaaacataagatcaattacatataataagactgacattctaaatggaacttactctgacatgaaagtgctatcatatttaaaattatacatattgggttgctatacaagtctgggtactgttgctttattggaaggctgtttaaaatccatcaataccttaaagctacatctatgaagtttgtacataagcatgtatgtttcaatctgagaaaaatggagttctcacagaagaaatcctatgaaaaaatggtcctttaatgttggccttattgttagcttcctgggtagcaaggatgtcttgcacaacagtatgtcttatgaaaaattaaagcaaaacaaataccgttgttcagtaaaaaccttaccaattccatttataaattcaacttgcaagtattttccattgcacatataaatcttgttaccaaataatcttctacacattctttaaatttttaaaatgaataaagggaatacactgtaaaatcagtaaatgttttcatctaaggcttgaacaattgataattatgcccatttgtttttaacttttgtgtcaaagtattaattttctctatgtcaaaggacttttagatttagaatcacataccaacattgagagtgctttggtttcattaaactcatcttacttagtttcagccctttatacctccttttatcttattttttaaattgacacgtaataattgtacatatttatgaagcatatagtggttttaatacatatgatgtatagtgatcagatcagaataattagcatatccgtcatctcaaacatttatcattttttgtgttgggaacattcaatatcttccttccagctatttgaaactatataataaattatttttaactgtagtcatcctacagtggtgtggagagctagaatgtgttcctcctatctagttgtaattttgtgtcctttaacagatttctctctgtccccacctttccccgatttttgtctagaatcctctgctctttttacttctaggcagacttcctttttggaaccttttgtgtttggtttctgaatcttgcctcttttactttttagtactcagggcagaaatatttcccctcccttcttttagatctctagctttgccttttactttaccactccttgtctgtcttttctgttttggtcatttattacctctggtcatggtttgggctgaacagtggccaaggagccagcatcacaggtgttctcttctaagtatggtcctgtctccttaggatgagcctggttattttccttatccacggaggtacaaacagtaccatcttgattatcctcacactccagcccatgatttaggccatctatggattgtcatttctttctcattatctctttgtatcactactatttgtttcaaaattagcttttaatattatctgaaatcaagagattcttattttaaaatatatatattctgtgttatatttttactggttctcctacctgtgcccctaatatttctttttctttttttcagatggagttttgctctcatcacccaggctggagtgcagtggcgcgatcttggctcactgcaacctccgcctcctgggttcaagcgattctcctgttctcctgcctcagcctcccaagcaactgggattacagggacccaccaccaggcccagctaatttttttgtgtgtttttagtagagatggggtttcaccatgttggccaggctggtctcaaacttctgacctcaggtgatgtgcccactttggcctcccaaagtgctgggattacagacgtgagccactgcgactggccatctgagcccctaatatttctttcagattttactcagcatatctggggggaaaggaagtatatgcagtacatttgaaaggtggaccatatttattcctgagctagctcactttgggcctttctgtgtcgttacatgctcatattcccccacagcaaaggcatttgcattgcacaagtctgttcagatttacgatgatctcacaatgtcattcagggacagaatccctcaatgaatcagagaaaaagagggctaagtattgttggcataggggattgttcttctagtaagcacaggtgaaattctcccttccttcaaatgcgctttgtggtaaagctctatctgttttctggactcatactccttcaaagatgatagagggaatgcaggcagaggtgagacttggagcagtgcttctcaaactctgttgaggatgtgaggtctctattcttctataaaatgaagtaaaaattagtttctagaaaactgaaatgaaaaacaggcccacaacaacatccccctacttttttattattagaatagacagacacaacattaattggccaaattgccttacaaatttctaaacatggactctccatatctatacttaaccagtactggttgggggaccatactttcacagccagtttaggacacttctacccataccagatagaaagtgcttaattttcaaaaaccaactccattagcaggtaggggtgtgggagggtgggtttgctttacttgaatttagaaaatcctgcaagtataggggaaatctgttaatgagctaagactatacaaagattcttagtagaaaataaacataacatttatgcttgctgtatcataacatgatctgtgcagatatgcatcctaaggcttagaaaagaaagctttcgaagaatgggtgaatttaaaatcaagaagcttaaaatttccttccccaaatatgctcttcacagagataaaggctttctccctggctctgtctaaatataagtaagcaccttggaaaacattgagtcagagccctttttatacccttacatgttgcttctttaatgttttgtctgcccactgccaattgatctcaaataagtctaatttttggaaggaatttcattcacattcatggatcctggattcttcaggagcttggagcttctcctctgtgataagaaagcactgcataagataggaagtcaattgggattagaattcaatatgtcagctaactcagaaatcccagtacagaatttagcactcctggtcaacgggtactctccagggatcttggcctccagaaatcaattattggattacatccatctaacccaagagtgggtttgatggtggctgtttttattttctattacgaagagagtgataatgtttattttatgaggatagatggtaaaaacaatctttatttcaaaaatagtatcagttctgttgaatgattttgcgttccacaggattaattttcaagatatttgaattgggaaagctgaaatgactataaaaagcatgtagtgccttaagttttttggaatgaaatgaaatgtgcacccatttaagactttcatttaactcagacacttaaaatatcgagaaaataaatgacttctcttggctaattgtcttatgtacaataaaattgagggtaagtattaggtaaaaggtaagtggtatcattggatttcctctctaattaagaagagatccagtgacagtttgttttcatggggcactttagaaattgtgattgtgctggtttctcatttaactttacaataatttattatgacaagtaacagaaagtagataacagagtttaagtggtttatactttcatacttctatgttgtgttcctgtcttacagacttttatagtattgaataaagggaaggccatcttccggttcagtgccacctctgccctgtacattttaactcccttcaatcctcttaggaaaatagctattaagattttggtacattcatatcctttttcaagtgattaatattaactatttgtacatgatctgtaagcactttatagctaaatatcaaattaagttgggaaatgtccatattatatagttttcatcactctcattttgcatctttgtcatattagcctcattcttaaagttcattaatcacatagacattactgaaacatgtactctttaacattttatatattatatataaacatgtatttatgtacttttgttatctttctaaaaacacttatatgtattgaatcctacaaatctaaagtaagataaccatgtttacctctaccatctttatacaaagtttgtgatggtgtagaattttcagtgagcaatgatatgataacagaaaaatctacttccagactcaagtttatccatagttatgatataaaacacttcagtgtatcttagaataaacctttaagtatattttctgtcagagaatgtcaggagtctttggccagtacttagttaattcttgaaatttcctgatgatttttgtgaaggaagtactggaatattggctgaatttcaaattcaagtcatgagttatgatgctgccatgcaaaactgtttgcttagtaaagactccggaagttaatgagagaagttggcatatatttccaaatggtcttaagggatttggtttcatgattcccattggtgttaaaaaggactccacgactaaattcatttgttaatcaatttaggaaaacaattcacttctgattgtatcttgtttgatagctttgacaataatagatattaaaataccattataattatcataagctcatacttttttttaaaggattctaaaatttgaacggccattctaattttaatatgacagcaagaaatttctttagtggtataaatatgctattactaaaattaaaagatttgaaacataaaaatcatatgatagggtttttatacttagggaagtttccttgtcccagtttgtattcctagcgccatcatgtggtcatttgatgaaaactttctttttcaattatggaaaatttttgttttggcagtaaactatagtggaaagaatattggatcttaatgtaggaaacttatattctagtcctggaccctttatctgattcctctagagcttagtaaggccttatttccctgatttttaaaatatagtgataaactaatttttagggtccctttcagttttataattctgttatgtctgttcatttgttttagctaccacttagagtatatttacttacgtaccgtgactgttccaagcatttccaatacattaactcatttaatctgcatgtagaaatggttacattacaaaatgagtacattattagctccattgtagagaagtaggaagagatacaaggcaatggcacagagaggttgagtctcttggccaacatcactttgctatgttgaattttaattacattcccatcatgttaagtgtcaaccttcaagaatattcacttttaatgttatcgaatcctgctgcacttgtataaactcagtcaaaatagagcaacccaacaattagcatcgtgctgtactttgactacaaattgttttcatgcgttgaactgtgttggataagatgtgtttaagaaattacaatattgcagataagtggccttcctcaacaatttactagtttattcacctgaatgagctcaagtcaatactttctgctgaaaaactgtgcaactccaggtagcacaaaaatagtcttcccactgaagttctctgggaggtgaatatattgatttaataatagttgtaaaaacaacaccttatactgatataatgctttcatatacattacctcatttaatctatacaaatactcagtgaaggtgatattattacccacattttacacatgaagaaattgaaatgtaaggagattagaagacttgcccacaatgcatttatccctgaattttggctaagctgcagtttgggcttttcaatgttagctttttgtaatataacacttggattttgattttcttttgtgtgttccttaacaataacctacattattcagcatgctaattatgtgcactattttgacaaactgtgtgtttatgacaatgagtaaccctcctgattggacaaagaatgtagagtaagttcaacttatatttttaataacatatatacatttgggattttgaaactgtgtcttaatgtagtcttaaaataaaactgaagagcattttattaaagtcattcctagacaaaattacgcagcaagaggacaatgctcattggccctcaggcctgctggcgttatactgattatcactctcttttgcctgtacctggtgttcacctgaagaccaccactcttggacatttacccctttttctttaaaatctacagtagccaaaccaaatgtggtcaaagcaattgcagaaaagagccaatatggtagacattggttccagttaaattccagataaatacattgaatcaagaatcaaaaagggttagttacaaatgccatgtgaagacaacattgaacctcgcaaagttttcatttccatcaggcacattcacttcatgtcaggccaatatagttccaagcgtggtcaccaacaaattgaaaaataatccaaagtttcagggttgtagaacttgaaaattcagtagactgaagactaaactaacagaagtggaactttttgtagagctttcagaaaccagaagcattactaactatattgatgatctctctgttctggggataccttcgaagcacagaggccagatttgtgataactgaagttgggctactctaaccatagctgctcacctgcccacacttcctatttgtaatgcctgttactatacagctgctgacccatagcaactacagaagtattaggttggtgtaaacataattgtggtttttgccattaccttcaattgaagctaatgtttgcaccaacctatttccaagagtgtccaccaacatttgcaccaacctatttccaagagtgtctcctttcctagacacttccaggctgaaaccaataagaaacatgacatcttgaagaaaataataaattttatatacaaaaaaattctaaagtattgaagctaatatgggaggccccacaggttttcagtcgccctagttttcttgtgattttatgccactctcacaccccaatttctgagtagaagatttaaactttggaaacacctaagtttctgaattatcagaagaattttattctaaattaaatttttacttcttataaccctagaagtatttactttgattttaaagaagtccttgttccaagcaagttaaattatcttgtagaaaaaaaaaaacacgtgctaatttgtcagtttcctctcattcttagaacactattaaacttgagatttttttccctaaaagaaaatcatttcatgcttctgcaatattattgattggctattccatcatgtaaacatactaaatatttctcaggagactatatttacataaataccaagacatttcagacaatggctaaatagatttcatataccttgtatttctcacactactcttaagacactttacgaaacaactctttgtgttaggaagctgaatttaaatttagggctacgtttcatttgtatgaaattaaaatccatctgcttagttttcttttttagtatttatctattccactgatggagtgataagaaattggtatgctatgaaaaaacactgttactttatcaaattttttggatgcttgttttcagatacaccttcacaggaatatatacttttgaatcacttataaaaattattgcaaggggattctgtttagaagattttactttccttcgggatccatggaactggctcgatttcactgtcattacatttgcgtaagtgccttttttgaaactttaagagagaacatagtttggttttccatcagtgcttatgcttttaagaataggtttgctttacctgtagaatattttggtgtgatttatacattcaaactctggatttcaatttagcacaacaaaggtctaagtggaatttcactatagcatgaaggctttgcagtagttgaaaactacaattttcacacgtagcatcagtcagaaaatttcacatatgccactcttccacacacacatgcacaaacacacacacatatgaacacacacaatctaatgtcaaaacacaagcatatttgtaatacatctgtgaaaataactttaaaaattacagccacaaaacagttctattggctacacaaatttgcaatgaccttgctgatattacacacagcttcttttattggtttggtaaaataattgaaagtaagtatctactagcatcaaaacgatctgacaaatcaaactaagagaagaaagaagatacttgaaatattatgtttttaatatattaaattactgatttctaagacctgtagaggaatacattctctctgcctctttctgtttctctcctgaccccttttctttcttcttttcttctttccttttatggctctcttcatctctttagtctgaacataaacttccttatccttatctcctattcatatccactcagtaatatgcacagtttatgcaccccaatgcttttttttctagtggcaaacttcctcaggaagagacccagaaaaataatagaaaaccattccagactaagtgaaagtagagtgtagaaggaggcagcccaacaacacttaccctcatccttccttcaggagctgattttttggcctctaacagttgtgatgtagtggataggagcaggagaggtggcactgatacactcaggactccgaatgtctggtcttaatttcctatctgatcaggatgagccaattctttgctaggctctctggtcacagctcaaaagaaggcctacaggacttctatttcttaagaacaaaatggcagtaacaataggcgcagcattggaccctcatcaagtattgttcttaatttgcttaacttttatttaaaagttacactaggaaaatcttatctcatatataaaagcagtaaggcaaactgccttttcatgcctaaatttctgttgggtgatttcatatatttttttctaactaaaaccctaaaccatagccaagatttactttctttttacaagttacacatgatgttggttgcattgctttccagagtgacaacaagggtgtctactttatgaagtttacatttagctaatggccttaaattatgtgaacaaagattaatgatggaatctaattcctgatttaccacttataatatttatcatttaaaatcaccaagaaggtctttataaaagacccatgcaagtaatataaatcctgctaaaatcttgaataattctgatttaattctacaggtttgtaacagaatttgtaaacctaggcaatttttcagctcttcgcactttcagagtcttgagagctttgaaaactatttcggtaattccaggtaagaagtgattagagtaaaggataggctctttgtacctacagctttttctttgtgtcctgtttttgtgtttgtgtgtgaactccctattacaggtacgtcacagagtttgtggacctgggcaatgtctcggcattgagaacattcagagttctccgagcattgaagacgatttcagtcattccaggtgagagcaaggttagataatgagacggacccatcatgtgattcagcatccttctctgcttgacattcagttttacagaaaatcaggaatcataagactaggtgtttcaaagaaaatgattcttattgtttagacataagctttatcagccttggagtttaacaatgtcttatgtgagatactgtaatttgaggtcaaggtgacctgcacttacaaatatcatgggtttttttttttttcaccatgttagttttatcgagaatttgctcccttttaaatgtaccaatctgtaatttcttattcattagagtcattaatgactatgtgtatacaatgcaaatcttctaagttttttgctaacaaaagagaagggaataagacaataaagaatagtgtgagtctgcatggaggatttattatcttaaggcacaattatactgcagaccattttcggttgtacagcaaaatctttcctacttataaataggaattttaaaatatttattcaggtattttgttataaaactgacctctgaccctaatgaaaatatgagacaagtttcagtagcaaaaaggaaaaagacaaggccctttccttaatataggctccatgaagaacatgaaccttccattactctatctcgacataatgggatatgaatcttcatttcattgtttaaatcattacatttctggagtttatcttcataagttcttccccttcaatgaagtgttgcttctccactagcgttgcaaacattcttggatttatgaatgaaatctatgttttcaagaaaattgtgtgaagcttttattatttcacacgtgttaagtcttcatagtaatagacttctttctttcaggcctgaaaaccattgtgggagccctgatccagtctgtgaagaagctctcagatgtaatgatcctgactgtgttctgtctgagcgtatttgctctaattgggctgcagctgttcatgggcaacctgaggaataaatgtatacaatggcctcccaccaatgcttccttggaggaacatagtatagaaaagaatataactgtgaattataatggtacacttataaatgaaactgtctttgagtttgactggaagtcatatattcaagattcaagtaagaattattgttatgtacatttccttaaaaagtagaattggattgtttgtaacacaaaggataaatacttgaggggctggatatcccattttacatgatgtgattagcacacattgcaggcctgtatcaaaacatctcatgtaccccatatatagaaacacctaccatgtacccacaaaaattaaaatttaaaatttaaaactaatgaaataaataaaacaccctctaaaaaagaattactatcatgtatatttggtcttttcattgctaatgtgccttccatctaggaatgaaaaatatttttaaatgattacataacaagacgtgatcttttagaaaattacctaatcaaactatttaacaatatttaaaattatattttatttggtatttctaccccctggattttaaataatagattatttatatttctggaactaaaagaagaattttgttaatcaccttatcaatggcttccacatacatttaacaactttgttcataactactctagttttgactcctaaatgccactttctattttatcatcatttggaaggctgaagaattcagctagaaagaattttcctaggatccttggttgctatacattcttcctgtggtgattgatataatgaaaggagataaaatatgtgaatgccctttgcgaattctacaatactatgcaaatgtaactcattatacattaattacacaatgtctttaatgtatcagaaactgtatagtacactggggaaaataatggaggtaatgcatggcttcagagtgttatagtttaatagattattttattaccttaaggaaataaagtgatacctaaaagtaaatcttattcttatatttaaaaagtagtattacattaaaaagaagaaaattacagttaataaagcttcaggagacagtaatagaaaatgttagttgggtgcagtggctcacacctataatcctagcactttgggaggctgaggctggaggatcacttgaggccaggagtttgagaccagtgtgggcaacatagtgagaccccttctctacaaaaaaaaaatatatacacacatatatatatatatatatatatatactttttttaatgagttgggtgtggtggcatcttcccatctcagcctccttagtagctggtgatacgaatgccagtaggtccacttcaatcaccagctccctgaaatctgttgtttgtttgttttatctaagttcaaaatactgactatgagggttatttagggtttattctctctagggaaaatttattggactgcatttttccaatactcgaagtaaaataatatctgaggtcattttcagctctaaacatctatggttcttattttaaaccaaatgcaaatataaataaaatggttcatttctgaaaataatagaaaattaaatttattaaaattaaaggtaactattataactgaaaaattatattttcctcaggttaaggctgatcattaaggttagatcattgaatttaatgggcaaaacttcatttataaatatgagatatcaaaaattcatccagaaactattatagtcctttctctttgtttaattttaattgaaagttaggaaatactatgtcaactttcctgtctaggttcaaggaagtcagaatattagaaataaaaatgatatttttccttatgtgcttctgtgtcctgtacagaactatgtatggaataaattcctcagaaaacttagcatctagaaaatatatcttcttacaaaatccaacattgattgtttaattccatgtttttctctttttgtcttttatttacttattcattcaataaactttacagaaaggctacccggtctcaaacaaacactaatatagaaataattaatgattgggactttctaggaggaatatttgtaaataaataattacaatatagtagtgtcatcctaagaataattcaagtatatacaggttactggtagcacagtgaggggagttcttaattatgtcaatatttagtagaaagaaagttgaaaataccaaggaaaaagttatagaagaactggacattgcaagaagccaaggagtttgcaagaaacaggaatctttgagataatgtagtgttcacctatagtcattattttagctttagtatttaagactttttaaaattgctttcatttcagttgttgatatgatttatgcatattttactataagttgcctatattctgcaaaatgtgagaatatgttatacttaattattaaaatgtatagtgttaaaaatataggcgagaggaccagaaaatatactattcttttattttgaaatatgtggctgttttgcaaaaacaaagaaattcctgtcattcctgtctatttttactgaatgaatttttttcgtgagaatggtgaacaaatgctaatacctttttgaaagattatgttagtacctgtcattatcactaactttacattcataatgaagaaatactttgcactgtaaagtgtctaaagtatctttgcactgtatctaatctaatgtcatttcttcataatgaagaaatactttgcactgtaaagtatctaatagaatatctagaatttagagggagaagagacaaatacttgtgcctttgaatgaataatatatttaaaattactcaataaacttaaaagtagaacctgaccttcctgttctcatttgagtgtttttaacaatgcaaatgttcatcatacgactttcttttttcaaacaggatatcattatttcctggagggttttttagatgcactactatgtggaaatagctctgatgcagggtaagtcaataatttgtgtgtatctgtgtatatttgtatgtacacatacatatgtgtatcttttctctctttttatagaaactgaagataacagccaactaattttattgacattaatttgctatatgtaaggtttttgataaagtatgagattatgtaaatattaggtaagatttatgttttctaaaacaagaagtaatacttttagacacatgcacacgtatgttcattgcagcactattcacaatagcaaagacatggaatcaacctaaatgtccatcaatgataggctggataaagaaaatgtggtacatatacatcatgggatactatgcagccataaaaaataactagatcatgtcctttgcagggatatggatagaactggaggctattatccttagcaaactattgcaggaacagaaaactaagtaccgcatgtcctcacttataagtgggagctaaatgatgagaacacatggacacatatagggaacaacacacactagggcctaccagagtgtgcaaggtgggaagagggagaggatcaggaaaaataactagtgggtactaggcttaatacctcagtgatgaaataatctacacaacaaaccctcatgacacacatttacctatataacaaacctgtacatgtacgtacccctgaacttcaaataaaagtataaaaaaagagaaaaatatctattaaacacctactgtatataacagcaaacatacaaaaagaggagtaatcctgttcctacttttttaggagtatataataataacaatgttgttcttttagataagtatattgagctataaactctggagactccatagtagtaaaaatgaaatggaggtgttgaaaatgcaaattatcaacaaaaattattttgtaaaatattattagaaatgctgcaccatattttaatgatgacaccaagtagctaataagactatatgcagtcaaaagttgggaaatagattagttacttatttgtcaaacttttattttgaaataccaaatctttctgactaggcaatatcatagcatagtatcagagtaaaaaggcagcagaacgacttgtaatactttcttttaccccacttgcagccaatgtccagagggatatatgtgtgtgaaagctggtagaaatcccaattatggctacacaagctttgataccttcagttgggcttttttgtccttgtttcgactaatgactcaggacttctgggaaaatctttatcaactggtgagaactaaagagccacactctccatttaagtaaaagtatacaagaaaaccaattgagttatgaaattaaaaccggatgataatatagtagaaagagcagaacttgaaacgagacttgagttcctctatcctattgattataacacatactgagcagagtgatgccaaggattgcaattctctcccatttcttcttggctcaaaacctgttccctacccttctcagacacagattgtcctaaacagaaggcacattctcccttcagccctatctaccccctcaaatattatccctcaggtgggaagtaatgaaaatgaaaaagcagatatagaaagataactttggtctgttccttgactttcctaaaggctcaggtcgttaatggaggactccatggcattttattgactgtttcattcttggtgaatacaaaaattctgccatagaaatcatagtgtgaatgcataagctagaagagaaggaagaagctgaagttaaagaaacaataaaaaaaaagtacagggtgctatgaccaacataattactatttatatctgagttttgctagacacatgagtaaattgaaagttgaagccaccacttagtgaaataatattgagaaataattctgatatttttgtttgcagacattacgtgctgctgggaaaacgtacatgatattttttgtattggtcattttcttgggctcattctacctaataaatttgatcctggctgtggtggccatggcctacgaggaacagaatcaggccaccttggaagaagcagaacagaaagaggccgaatttcagcagatgattgaacagcttaaaaagcaacaggaggcagctcaggtaaagctgccctgtctcatggcactgaccttttatcgttctgattgttacgtaatattgaagagaaagtgagtacctaagagcaggtggttgtatgaggaattaataatgatttctatattttgatgatccacttacttttatttagtttaattattttatttgagatgtgtataataataaccacaatagaactctctcatgctattttaatcatcttaagattctcaaagtaaagggaaaatgttattttggggtattttcaagtgagagacttttattcaatgagtagactggcattaggaggaaatcatcttttcttagaacaagaaattattggttatcatatgaagagttgctcctctagttcttaaacatagtctccttttttctttaactaaaaatatgttggcttttaacgtggttgctttattacctttataaggaagtgatcaaataatataatgatctctgatacagcagcatccaatagacatatgaatgttaccaatcttacacagattgaccatctaaaaaggattacttgtttttatagtgaagtgttagtcctcacagtgtgataaatcataaaatgcctctcctatctctctcatctttctgtttagcatacaaacttattgtctttactaaagaagaaagttgtttcagaaatattaatttatatgcaagagtaattaatttatcgaggttaccctgggaacaatgataataataaaaaagtgtcaacttagtaccagtacaagctataatcaaaaagcattgttttattccatgcccatgtgccccttaagaaccagtactgatttgaagatggtggggacagtttttggagaactggatgtcttatcttgctcagcagaaactattgattctcccttccccattcttctggatattgtggatgggtgagaaagggattttataactgtccataaataggattaataatattttgagggtattggacaatccaatttcaataactagagaaaggacctcaggtccttatcccattcccctgccttaaactcatcagcttttcttccatactcgagtttctttttcggagaaaagaaaacaacactaattaaataccaatttttaaagtaaatcaaatcccaaaaagtaatgaatttattttcttgttgatacatgttggatatttttgaatacgtggtctgtggagcattaacagagacataataaatgttaccatggagcaaactaaattatctccaaaagccttcattaggtagaaagaaaaaaaaaatctcctcttatacttgcagagaatcttctctgtgagatgatcttcagtcagttcaatatattttttaaaagccatgcaaatacttcagccctttcaaagaaagatacagtctcttcaggtgctatgttaaaatcatttctcttcaatatagcaggcagcaacggcaactgcctcagaacattccagagagcccagtgcagcaggcaggctctcagacagctcatctgaagcctctaagttgagttccaagagtgctaaggaaagaagaaatcggaggaagaaaagaaaacagaaagagcagtctggtggggaagagaaagatgaggatgaattccaaaaatctgaatctgaggacagcatcaggaggaaaggttttcgcttctccattgaagggaaccgattgacatatgaaaagaggtactcctccccacaccaggtatggcactgctgagtttactgatgcatggttgaaaattaaaacatgggagagagggggagaattagaaaatggactcaggaatttttatcaactgaatcaaccactgttgtgttatatttaaacccatcccttcttcacatagttatgcaaaaactttactccacagatatgtaagtctacagctcggtgtagttaagataacaccaagttgacagtcaggagaactggactgtcattctgatactgtctgctgatatttgtctataactaatgacatttaatctttttgatcctcagcacttttaagaaaaaaaaaaatgtggaactccggatagtcgatcaggaatgtccttaggttattttatgattttatgttttttttccccctaacttctttataagtcaccatgcatgcttctgaaaatattagtcatggtacacttgatcaaaaggcacatgactctgaatttcagaagtatgaacttcaagttccaacaatacaatgccttataggtgaaaaagaaataataattaaagtgattttagaaaggtggactaaagtaaattgtgaggagtgttgaaagtttttgaaagacaagatccataaaaaccaaggtggccttgttaaggtcatggtgccagtgttcactgaatgtttaccacgtccattgccatattctaaggatgtttccctttgaacttgagaaatggtcgttcagggtgtgtgtgtatgtgtgtgtgtgtgtgtttcaatatgttaaggttgcaatctatctcctcattctttaatcccaagggctagaaactttcttttatcaaggtaatttaatttaatgtgaatgcacataaaatgagaatgataatcaaaaggaatgaaccatattctgttatgaatgctgaaatctccttctacataatcttgcaaaatgaaatcacattcaaatgtccatattaatatgactttatttgtttgctctttcaaacttctagtctttgttgagcatccgtggctccctattttcaccaaggcgaaatagcagaacaagccttttcagctttagagggcgagcaaaggatgtgggatctgagaacgacttcgcagatgatgagcacagcacctttgaggataacgagagccgtagagattccttgtttgtgccccgacgacacggagagagacgcaacagcaacctgagtcagaccagtaggtcatcccggatgctggcagtgtttccagcgaatgggaagatgcacagcactgtggattgcaatggtgtggtttccttggttggtggaccttcagttcctacatcgcctgttggacagcttctgccagaggtgataatagataagccagctactgatgacaatgtaaggaagttttaaatagttcaggcatggctggctcactattgctgcaccagccagtgtttctacagaacggcaaccttgagaatgattcctggttggtcacgctgtgaatgcacctgcatcttgtaatatctttaatagactaaccaactaaaacttaaaaccttagcagtctcctgcacaaacctgaatgcatttacttattaaaagtgctaaggattgattagacacaataattactgcctccagttggaggatttgctatatacccacactgaatttagatagcaggacattctccaaggctctggtatgaaagtaaatgaatgattctatgtttaagtgtcaagggtatgtaataaatctttccaatggattcttcaagatctctgctttagtttagattttcaaaaacactgcttaagtagatagcttcattgttaccttaatactcctagtactcatatttttcttactaaaaaatgctgatataggtcttctcaaaattaaatgaagagacacaaatacattattaatacagacagataaaataattgtctgtgtacaaaggtatgttatgtgtttgtggatgtatactcagatgaggaatttctaaacagatgctgcctcttcttagactgtttactcacttggaaatatatcagcatgaggaggcatgactaagtcagaattagatgacttattgctttggtaccctggatgaaactgttgtccatgcagcatgtgtgtgttctttttaacatagagtttgtgttgtcaatgaccatctacatcttgtgtccagaaaataagatggcagctaagtgtgttgcaatcatttatacttccttaaaattaaatagctaccttctcaaaaatcaagtgccttgatcacttgtaggacttttaagttactaggcttttactattagttcagaaataagggtaataactgttaaatatatctcttaagagttttatcaactatattaaaattattttgtattttataaaattatgaaatcaggaagttaacatcttggtttttgctgtatgactaaatggttaacagtttgaacattccaggctaatgatacaataagtcagaaatatctgccatcaccaattgaatatgaaagtgcatgatgcatgtgtttcatgaaattcactgtgtcaccatttggttgtttgcttgtcatattgctcaaattaattgtttaatgcattagcatttttttttacagggaacaaccactgaaactgaaatgagaaagagaaggtcaagttctttccacgtttccatggactttctagaagatccttcccaaaggcaacgagcaatgagtatagccagcattctaacaaatacagtagaaggttggtaacaaattctattttcgtttcaattattttcaccaaacttatattgtctcatttcaaacaaatatatttgtgagttgggaatagtgcattctaatgaaaagacagtctaattcaagagctgttatttcttatatctactcagatattctagaagccttaacaatttattttaaaatgagtgatattgggactaagaatgttttcctaactgtgtagcaactctttgaaaatgcagaacaaagcatttctgttaggggtttctaatctcattagtcatagtgaccctctttttgttccattagtttaagacttcagcagtacagcccttttcagcctcatcctaagtactctcaagattgtagaggaagagcaggtcattttcacaaaataaaaacaagctaaaaagatgattcttgggtcacatcaatccctattctagctctcatagtctgaggttgacaatgtagagtcattcacatagggttgcacacacaatatctacaccaccctaaaccatgttcccattgagacgtcacatgaaagaccactcatttaacttgaggccaagtgctgagccacaatgtcagtgcataagacaaaaaactacccattgttacctgggctctatgtgtgtgtctgatgaaatatccttgggaggtttagagtaaactgtaatttttttaacaagtacaaaaaaggttgtctctgtaacaaaaatgtgttgattactgaaaataagtttagtggatatgaaataaatgtgtgtgtataaagtataccttttggtggttcttttttttttttttcttaatctagaacttgaagaatccaggcagaaatgcccaccctgttggtataaattttccaacatattcttaatctgggactgttctccatattggttaaaagtgaaacatgttgtcaacctggttgtgatggacccatttgttgacctggccatcaccatctgtattgtcttaaatactcttttcatggccatggagcactatccaatgacggaccatttcaataatgtgcttacagtaggaaacttggtaagcatattggaaggtaaatgtgtttagtcttcaaattttctgcttgaaaaactgtttacatttaattgtgtatagcagtctttcaaccatccttcatgcttcctggcccctgcaaaatcgcaattatatttagctggctatactctacttttttgccaaaaataatcacccttaatgtgctcacaaaaactgagaaaggcataggcctacagcactacttgaaaagtcaacagcaatatttataatttttcaggatccagaagtagctcatagattaagaacatactttttgagatattattacaatttcccttactgtagaagattaaaataaaattgtggatctcttttatccttcttagtcatcatcactgcaagaaataatttaacaactcaaaaatgtctccagcttttcctcttccaggatctaagtagtacatgtattgtttatccatctattctatatcaaaaccatgaactattgaaaacttccagtacattttgtgtgttatatgattacaaaggtcatttttggtgaagattgccacttaatttttcctttttgtgcttcaaaaacataaattattaaagtgtttgccagtcaactcaacttaggaatactagcttttatttgctgaaggaaagagctatctaaagtaatttatgcatttcctgtaatatttggtttgaagtttaggatttttgatggtagaaaacaaaagcatcatgcataacaacctgcattttattagttatatttttgaagttctactatttatactacagaagtaaatttatttttttcatgtgcataacaaagaatgacaatagtaatgcacctagtataatagataagaatgtataactctgattgagggaaataggaataagcttatagataaataaaagtgctcatgggcaaaatgttgtcagtacttgtggtatataaagtctggacaaaaaggtagtttggtataatggaaagagcactgttaaaaatagatgacttgggctgggcgcagtggctcacgcctgtaatcccagcactttgggaggccgaggcggacggatcacgaggtcaggagatcgagaccatcctgcctaacatggtgaaaccccgtctctactaaaaatacaaaaaattaggcgggcgtggtggcgggcgcctgtagtcccagctactcgggaggctgaggcaggagaatggcgtgaacccaggagcttgcagtgagccaagatggcaccactacactccagcctgggcgacagactgacactccgtctcaaaaaaaaaaaaaaaaaaaaaaaaaaaaaaaagatgacttgtactcaaatcctagttttgccattttcttgctgtatgatatcaagcaagccatttcacccatctgaagacctcagtttccttatctgtaaagtaataattgtatattatctacttcgcgtttccacaaggataaaattaaataatgtatatgaaagtctttcatcaactacaaattgccatacaaatttaagttagtaatagaatcattgtgggaaaatagcataagcattatgttctaagagcaaatcttatgtcatgtatgttattatctggtggaattagattaattttgttttgatcttaggttttcactgggatctttacagcagaaatgtttctgaaaattattgccatggatccttactattatttccaagaaggctggaatatctttgacggttttattgtgacgcttagcctggtagaacttggactcgccaatgtggaaggattatctgttctccgttcatttcgattggtaaaaaaaaaaaaaaaaagcaccaaattcaaaaacctttctaacaatcagggttcttgcatagcaatgtcatagtttttttgccacacaaccattagcattgtaagtttttctgtaacatttgcattgtcaaaaacttttcctacatggaaaaaaattctcaattatttatgaaaacctttatttcaaagaacatagttacgtaaaagttaacgtattactcagttgctattttcactaagtattgcttctagagactactacagttaatatttctagacctaagaaaatatttttaatgaaaatgcatcaccttttaatagtaacttgaaaatatatatagccctttgtagcagtggatgaaaatcagatgtaagatgtgcatgcagaaactttttctaattctgtctctggaaaatatgcatcttgcgaaagtcaaaggagagaaagtctgtaggattactaagcatgcccattaattcacacatatatccttacaagtcaggaaaataattgtagaattataggaaatattccaagtttttcaatgcaggtggatgtaactacatgaatacccctaaggagcattaatgaataatgaacactttacttatatcagggctcagtatgatgttactttgcacactactggcaaattaatatctttcagcagagatatttcagattcagatgttaatattataatatccggccttagaaccacctttataaaacaaattaagaacagttggattccaagtactcattaaaaattcactataagaggcctggcttggtggctcatgcctgtaatcctagcactttgggagactgaggcagttggatcacttgaggtcaggagttcgtgaccagcctggccaacatggtgaaactccgtctctactatatatatatttaaccaggtgtggtggcacgtgcctgtagtcccagctacttgggaggctggggcaggaggatcactttaacctgggaggcagaggttgcagtgagccgagatcactcctctgcactcccgcctgggtgacaaaagaaaaaaaaaaagaaaaggaaagaaaaataattcaccatcagagaaaatgatctacatggttaaaatatggaaaatccagcttttcctagggagtccaaaaattagccatgagcctgagacggttagggcagatcagatattgtaagatattgaattctaatgaccatttctaggtaaagctcaatatatataatgcttttaagaatcatacaaatatatattaatctttcattttccagctgcgagttttcaagttggcaaaatcttggccaacgttaaatatgctaataaagatcatcggcaattccgtgggggctctgggaaatttaaccctcgtcttggccatcatcgtcttcatttttgccgtggtcggcatgcagctctttggtaaaagctacaaagattgtgtctgcaagatcgccagtgattgtcaactcccacgctggcacatgaatgacttcttccactccttcctgattgtgttccgcgtgctgtgtggggagtggatagagaccatgtgggactgtatggaggttgctggtcaagccatgtgccttactgtcttcatgatggtcatggtgattggaaacctagtggtatgtacccacttaagatatgcattttggaaatacaccagcatggcacatgtatacatatgtaactaacctgcacattgtgcacatgtaccctaaaacttaaagtataataaaaaaaaagagtataatttaatggtgactgttttgtcaaaaagaaaaacaaactatgattattggtttaaaagtccattaccttggatatattatcactttaacaacacagcaatatagcagtgcccctgcattttttataccaaattctattttgtcagtcactttatcacattttttatgtgaattacaatagagtatcatattgagatgagcctaaaaggatgtgctgggaccattttataaattcagagccaaggaagagagaagtctaaaaaaagtagagagaaagtgcaaaattaccatccagactaggactaaaaagtggtgtctttaagagttcataatgcttgtgccatttctttgccccattgcagcatatgatattcaatcactctatgtcatatggcagatgcactagccaacctgagttcatcagttctcgaatggctaatgatgcctgagattaccataatggagtaactgatcaatctttatctctcttaaatttggagtgttactgtttatagtatagtaatacataaaatattctaaaggtatgtacattcatgtgccagtctcatggaaatatgagagattattcataaacagctctacttagtcaacaatgaagtatgagaaatataatagattaagaaaacaagtgtcagcctatgttaagctcctaatcttcattctgagttgtaatggttatttttcaattgacatccaatttaatatctttgtttattgaaaaattatagaatgcatttaaatgcatacttggaaacattagtgatttttaagaattctcgtattgtacacatataaatctgttttcttctactcatacaattttagagttaacaaaaccttagattagctcattcaatttcactttacgaatgggagaacttgagagcaacagaaatcatgtctttgtccaaggatgtgctattgagccagtcacaaattcagatcacccatcttctaatcactatgctgtggtgtttccttctcatcaagttttagaacttagagttttttccacacttaaaagaaagaataagtgattgtaatctgctcttccctacattggtgtaaaattataatcatgtttttgttgtttttaaggtcctgaatctctttctggccttgcttctgagctcatttagtgcagacaaccttgcagccactgatgatgataatgaaatgaataatctccaaattgctgtggataggatgcacaaaggagtagcttatgtgaaaagaaaaatatatgaatttattcaacagtccttcattaggaaacaaaagattttagatgaaattaaaccacttgatgatctaaacaacaagaaagacagttgtatgtccaatcatacagcagaaattgggaaagatcttgactatcttaaagatgtaaatggaactacaagtggtataggaactggcagcagtgttgaaaaatacattattgatgaaagtgattacatgtcattcataaacaaccccagtcttactgtgactgtaccaattgctgtaggagaatctgactttgaaaatttaaacacggaagactttagtagtgaatcggatctggaagaaagcaaagaggtaagattctataggtgtgggaaggtatgaatacatatacatatatacatatacacacatacagatgatcctcagcttaatgatgttttgacttaagatttttttttttttttactttatgataatacaaaagcaatagccattcactagaaaccatgctctaaattttgaattttgatcttttcccaggctagcaatttgtggtacaatatactctcatgctgggcaggggcagcaagctgcagctcccagtcaaccacgtgattacaaggataaacaaccaatatttaccgtacagtgtactgtattcaggaaattacctgagttatccaacagtttattataaatcatgctttcctttagatgattttgcccaactgtaggctaatctacatttcctgagcatgtttaaagtagactagggtaagctataaagtttggtagttaggtgtattaagtaagttttgatgtacaatattttcaactcacaatgagtttatcaggaactaacctcattgtaaattgaggaacatttacaatacatgcattatattgcctgtatttattattatatattttccatatagatttttttgacatcatgtaaaattttatttcactgaggaacaaaagatttaactcggaaatgactgataaattaaagggtaatatagtatacgtgtgagttttctcatccttagtaatggatatttgttagatgaatgaatgaacgatctaacaaatagacaaacatcatcagatttaatccttacaataacctggaaagaaatgtgttattatgttaacttttcagataagaaaattagcttagggagcattaggtcacatagctagtgaggggagtgccgagagttgaacttagagcccttgtttacaagttctgtttattgttttttgcatcacattggctcatgtacattgaagagaacttaacaacaagaaatattcttgtagctccttcaactaaaattacactgccctatgcattagcctgtttggactgccataacactataccataactgggtggcttaaacaaccaaaatttattttctcatagtccagaaactggaaagtccaagatcaagataccagcagcatcaatgtctagtgagggctcactccttgggttgcagacagccacctccttgctgcgtcctcacatggcctgtcctcaatgcatgtacatggaaagagagagaactctggtgtctattcttcttcttataagtgcaccagccctatcagaataaagtccaacctgtatgacctcatttaacctttatcaccaccttacaggccctatccccaaatacagtcatattgaaggttagagcttcagcatatgaattttgtggagacaaaactttaatccatagcaacctactttgaaatattaagttaaaagtctaatggatatataagataattaacaaggagtctaggacaaagcacctttacttcccatttagtgtttggaaatctcaaaaacagcagggtgcccatcttttaggctgtatagtctaaatattttaaaggattgaatacattaaagacattttattagagatacaattctattagatatcatcatgtccattgcattttgatagttgtccatggaagataccacaggtatgtgacattcttttgatttagtgactatatcccttaaaagatgcttcaagtatttataatgagtctctgaataatctaggtcagcctccacttttaggagtagggggctaatattggagctggaagcagctgccctgaccctagcattagagctgcttagttaattcagatttgtttgatgagagaagggaaagaaatatagtgcagagatgtaatagtagatagatcctgtcacatttccatgtctatggaaatagattcaggacaaaaaaaaaatagactgtttttatcaaatattgtggacttttttacagaaattttaatttggatattatgtcagttcagactttgtttatttgagttttcctaaggaatcagatgaaggctaattttttgaaaaattgttgtctttataaaattgtttctgaacttctgttaaaataaatttagtaatagcctagtctagcttcctttgtcttgaatctttagacctacatttagcatttgatgaggactaatggctaccatatgctatctgttatattaaaaaggaaaaagactattttacaaagaccatccataagatatacattttctgtaaaaatttgacatgattcttactcttattgtttttttatattgatcaaggctaaaagaaacactaacctttttataaagcaactatccactgaagcactagaggtagttctgtttctttctactttgtggtattttatatcttggaacattgcattaattgaaattttaaatgttaaggtaatagaaactttagagataatttaatgtggtgcttctcaaattgtgagtcatagtttagttagacttgagaaatccctttaataggccagtttttttttttaattttaatgaaatagtgatccgcccacctcagcctcccaaagtgctgggattacaggtgtgagctactgcacccggccaatgaaatagaacagaataacgttagagcacatttcatgtcagagggagaagtcctggtaaatgaagcttttgccacctgtgctgaactttaatgttttgtttgtctaattagaatgcaaccacttggttcatgggcatagtgtctgaagtccaggagttcttaagcttcagaaagactgtttcagctttttgaaggtagtgataatgaagccttcctaaccctaggcagaacagattgctttcttttttggttcccagagatataaggcatagagtatagtaataaataatgcatcttcttgactcatgcgtcttacaaagtactatcatattttagggtagctacttatatgcatgcatgtctctccttttatgtggtgacctacttaaacatgtttggtacaaagtagacactcagatcaaacttttccagctcattcaactcttcttaataaaaccattctgaagggctctcataaatactttctctgattagagcatacttgagattgtcattttaattccaattattttggaccaattttttctctagattcaagattcacttgagttagattttgttgtttttgtttttgttagccatgttaccttgtcactttacaccacccttctaagaaagtaataatctctcatcttttccacatgaattgctgttgaaatgcagttgtatctcatccagacgaaattttgtaattaaatactgaaacttctatttatcccctaatgatacatttcaatttcttttattcatttttgaatctggctttctttttatattctttcacagattaccacattgtatcaaatttcctggcacttttacttcacaattcctttcttcttggtcagaaataaacccacacaatattgtttgccctcattgcttcatcagtcttatactgtattctgttcatcaaagtaaggcataaattatgagatattctgcttttagaggaattaagctgacagcagatgccccaatagatgaagagtctttgttctacattaggaatgctgcctgtagtatattaatctcatcattttggttctttttgttttagcctttattctttttgcctattttcatttatttatcagttatcatatgccagggagactagataaaggagtatactaataagctataaggaatgattttctctctctgtctctgtgtgtgtgtgtgtgtgtgtgtgtgtgtgtgtatgactttcaacctttaagtatgaattttcatattgagacatatgttactgatgcaaaaatgttacctttcatggcctctattagactagtttcatttgaacatgttattgtttccattcctgaattccagtaatgacttatctacaatgcatcattataatacctccaaaattatattaatgccttgtgttaaaattacaagtgcccactgtttattcttcatacactaaatatttgtttttagacatgtgaggccacagttataaagttggtaaatggttatactctggagccagatactgggttatataatttcattttagccgcttactgtgtgactttacctatctaataatcagtttcctcatctcaaaaatgtgcataatgttactgactgcatttctgggacagagtattaaatgagataataaatgtgaagtacttagcacagtgcctaattaatatagaatatctggtaaatcatcattattattgttaccagttgcattccacactgttccagtaagttttcttacaagaattactactggtaacatactccactatttgtctttttttgttgtttgccttttgccctctgtaataaattgttttataagtttatctggggatggtgatacattttatattttctgtttatttttaaattgttttgattacattcttgatatggtaagctccttaaaatatttaagaaaattacttttctaaggggcattccaatcaggaaatacaaacatgcagaaacctaaagacaggaagcaagaggatgtatttggagacaattagtagtttggaattccgggggcgtaaatcacaggagctgaggatgagatgtaggtaaagagtcttggtttccaggaagcaagaatagactggtatgaagagatgtggtgaactggaacctcatatttattttgcctcttacatctgtggtgaactcacacctaactatcctccattccagagcaaactaagggctgttttttctacaccttcctcctattggtctccaaaagaagaaagggaatagcatgagtcacatttcatcctctctttaagtcctaagagacttcaaccttcaaagtacattcaagtaatttgaggaattgttttttaaaacctcagaaaatttcttgactcatgccatagtaggaataatgataagctagaaacatgaatttttattgaacattaataataaagaatggtgacttggacagatctgagagagctttgaaggctgggcaaaactgccaagactatgcaaaagacaatataaaatcttatctccccaaatagaaagtaaatttattttggttttggatagtattttataacatttctatcctccgaagcacctaccacaatgctgggtgcataacagttgcccaataattttttgaggtttggttgatttatatggatactagattaagagcttataagccttaactctactatgagcaaatcgctaaatctatattaccccgtttcctaatttattaaatgagatatctgtcctatgatgcttatagaaatgttatgaagatctaaaagctatttggaagttaaaaatgttcaaaagtgtaaggtgatgtcaagaaaattactacttaattccatttaaataaaaattttaaataaattgagttattaaagttgtaccttttgggaacaaaaaaggcacattactaaagtaattataaaagaaatacatttgtttttgcgatgagtgagctctagaataatgagtaaaaatgtgaggtccttagtaattcaggttatgttaataacagctattgtttaaatgttcaccatggacaaagtactattggagggcatatattgtcccattcagtctttatgccgtaagacacactgttattccagccttaagatgagaaaaataaacatattttgaacaaaggaaaacttgccaaagttacacaaacagtaagtggttggtcctggcagtctgctccatagtctgctccagagtcacgctcttaaccgctacactaaatcttaatagtgtctgaaaatgtactttctttggcatagttctgaaataaataatactatttgttgaagaactaggtacaggtgtcaactatagatttggtgttaacttccaatcactgcacattgggcataggttaacagcatagtctggagtgtttcagagtcctcctgcttagtcctgaaaggtcctgttcctctggtactggcctgcactttaggctgatctgcttctgcatcccacactgacctgtggtggtctaattctacttagagagcacttagtctcccagagtgtgatagttgtgcttaaggagcatccccttctgagtttaaagctgctggaagagtcttccaaatcattaggaagaacttctatgatgtatcattagcttatgaggtctttgagaacaggaaaaacactaaccctgtcttcccttaagtccacagcacatacaacatatttattaaatgaatgaataaataggtgatgggcagttacttctagatttccattttttcccaattatatcactgatatatatgcattttaaatctacttgttgctttgctgatatttttccatctaatacttttatcttacgttatatgggttaaggaacatacgacaatctccaacctaagcacatagtctctaagagatggcaactactctctgcgaagagtactatccatggaacccaagagtactatctccactacttctaattgatcactagggactgccaaagctacctatctttgtccacctctctgcattcccaaggcctttacccagtgtcagacctccatcatcttccagttttactgctacagcctccaaacgggtctcctctcgctagtgtagtcttgacaaaacaataggtggtctttctaaaatgcaaatcccgtaaccgttctgtcctccctaacctttcaggagttgcccattgctcacagtatggagtctatactacttaacatgggtacaagtccctgcaaaactgaccaccgctgactccttcagtatcatggaatagtacacctcacacctccccacccagctatactaatctttcattcaatgtaattccctatgctttatcagttctcatcgttataccttttctctctgacaggaatactctcttactctatcctgcttcacctgactcatcctcacccaccacatccttcttgtcccaaatgtcactttattctaccctgtccttcctagattgagctaggtggtgttctcaatatactctatactactcctattagagtgtgtggcaattgcttctctgtatcctccatctgattgtgaaccgacgagggcagatactaagtctattatgttcactattttatttttcaagtcctagttttgatgcctggcacatttttggtagtgaaaaagttcaaatatcaataattacacctattacaaacaatacaatactgtgatggaaattgttaccatttatcaaataagcatacgccaaacgttattcatgtgttatcttgttcagtccttataacaaggatgtgaagtaagaaccattttacaaattagaaacctaaagcctaaggaggtcagaataattggttaaagtccataaaaccagtgattgtgattcaaactcaagtttctctgatcctctgaacagtagtactttcaactctttcattatatagatatacagtttatttgcccagtagacacttattaagtatgttataatttaacattaaaaatcaatgtcaaaataacattatagaagctctgtgctcaatttggcaaaatgaatttaacaatgaaaattactcatttgatttgcattttggtttctagcttggggattataaatgcaatttttcagaatttttttgttttctttccaatttttttgtattaccatgattttctattgactcaatatgtctgaaatatgttgcttttgttcccttatatttaattattgatacagaagtttatgtgtgacctatcgaaagcaaaattcagagtagtatattagagccgtattcctccacgttcacttttatactgggcaagtgtttgactaaagaatagaaacaactgacattctgtaaatatgaataatcactgaagattgtcctttcaacatacagcttgatgaagaaatcaactgggaataatgtgggaattaatgagttaatatttgagttttctagctgccctgtggaaatgttgagtctcattacagtgtcttttccattgatattatattttcctttgttgagagtctttaataggggtcattttaatttttaatatgcatagtgtacaatagaaatatttactagtgcacaatgtacacaatgaaatattaatactagcatttctgaggttgtagagaacctcattttagcatgacttaggagatatatgtgtcacaatagtaaagtacccagcattaaaatagtacctgtccagctttaaaaataagtactttggataatattctttatatgttaaatatatacatgtgtatgttaaatatatatattaaatatatatgtacacacatatatacatatacaaatatatagacatcgcatgaccacatattaagtatgcttttgacccttaaattccagatttatttatattacttattataatttgaactcctactaaactctataaataagctccttataacaaaccaagtttaaaaataaaaatataaacattgtaggatcaagtcagagaacaagaaaaaaagcatttaatcacttactctcagagaatattgaagaaagttttctttgccttgctttgttttgccttaccctcaaggtcaaaatcatttgctatagtaaagagcattgttaaaaaacaagaaatttgcataaatccactgcggaggaaaactgctcttaccatcagggttgtagttattaagtggttattgaatgccctggtgtacaaggcaaagtggatgcttcatatacaacgtggtctctgcattctgtcagctcacatattaagtcagcctgccaaaaatacatggatgatacaagtcagtgtataagtgtataatttagctattaagattcatgtgtgaaaatatacatattcttaaataaactagcctatttagaaattggtaaaatttaaggttgattcatggtttaataaacattaaaatagattttaagaaatattccgggaggccgaggcgggcgaatcacgaggtcaggagatcgagaccaccctggctaacacggtgaaaccccatctctactaaaaatacaaaaaattagccgggtgcagtggtgggcacctgtagtcccagctacttgggaggctgagacaggagaatgacatgaacctgggaggcggagcttgcagtgagccgagatcacgccactgcactccagcctgagcgacagagcaagactcagtctcaaaaaaaaaaaaaaaaaaaaaagaaagaaagaaagagaaatattccattaatctctaaaacagtgagaacaaattactttattagtgaatagcaaatttcaaaatgaaattaaatttcaatctaagaacaaaaaaggaaaaattaattggccttactgatttttaaatctgtaaaaatacttatttgagaatattttagttttgccgttattgaatttctttagaattttatatgaattcgtatttcatgtgctaacatagaggtggacttttcctacacatctgaagaggagcttttccttccctttttgagtatttaataataatagtgttattatcccaatcaaataaagaattggaccacttcatcttttatctcaaccgttataagaatatattgatgcaaatatactggttatgaaggttttaatacaacttttttagcctatggtaaaatattttaaaaaatagatgacaacatttagattttggataatattaatagcaaaagtaaatatgactgtatattatctcaaaaaacatatttacagaaaatttttattttcaagggttcatggaatatttctataaaagtaaccatatactggagttcaaagtaaagctcaataaatttaaaatagctggcatatagggttatccagtcacaatgtagttaagcctgaaattaataataaattgatagaaagaattccaaccatttgaaaattaagaaattgcctcctaaacaaatattgaataaaagcataataaaataccaaaatagctatttcaaaaataaaagcattttatgtcaaaatttgtggaagaagaccaagtagtcattaatatgacttaatattactaatatgattaagaagggatgaaagaacctaacaaatatctttgagaaattagaaaaggaacaaaaaaggaagaagatatacataaagagaaaaaatagtgaattatcaatgtagcagacaatattggtataacaggttatggttcttaggaaaaaaaaatcagtaagacacacaaactttggtgtatcaggcagaattctaagatgatctcaatgacacttgcccttgtataatccccactccatgagtgtggttggaacctgtggatatggtatcaccctttaattacattacatttatgacaaaaagggggatgatgctgggtgggcctgacctaatcaggcaaactctttaaatgcacagtgatttctcctgctatcacatagaggaagctgaaaagatatgctctgcctggcctagaaaaaagcaaacacccatattgtaaattgcatacagcagccatgtggccagagactatgggtggcctctagttgctgagagtggttctgggccatgagctggcaggaaagtaggaagcccagtcttataattatgagaaatgaactctgccaacgacagtaaacttggaagaagatcctgagccctggaaaagaactggatttccagccaacaccttgacatcatctcaatgagaccctgagcagagaatccaactaggcagtgccagacttccgacctacagaaactgtgagttggtgaatgtatgttaagatgctgggtgtatgctcatttgttacacagacacagaaaacaaatacatttggcaaataatccttgttaggaaaactcaaatgattttctatgtgtaaagagcaattgcaatcaaataagaacactaatactccaatagaaaaataggcaaaagaccaagcaccgtggctcactcctgtagtcacagcactttgggaggccaaggtgggtgaattgcttgagctccggagttcaagaccagcctgaggatcagatgctgtctctacaaaaaatacaaaaattagccgggtgtggtggcatgcacctgtagtcccagttacttgggaggctgaggcagaattgcttgaacctgggaggtagaggctgcagtgagctgtgacttcatcactgcactccagcctgggtgacagaatgagacctgtctcaaataaacaaacaaataatagtcaaaagagacaagtcataaaaaatataactggaagacaaaccttaagaaatattactcctaattgttatcaaataagttaatatcaaaacaatggtagtgtaatttctgcttttcaatttggccaataaaaaagaagaaacaaaagcaaaacatgaaaaggaaaacaaaacaaaaacccaggtaaataatgcattatgctgatgaaggagatccatgagacagatacttaacacaaatctcagaacatggtatctttcaataaatgttgagtaattgaatatttcatatacagctaatagtgaaattaaaagcccagctacatgtggatggtttctttgtctctaaggtgggaatagctatttgcttctccttggtcagagatgatcacaggatttttcatttatttatttgtttgtttgtttgtttgttttttgagacagggcctcactcggtcatccacgccagagtgcagtggcgcaaccacagctcactgcagcctcaacctcctgggctcaagccgtcctcccacctcagcctccaaagtagcatgcaccaccacatccagctatttaaaaaaatttttggccaggcgcggtgtctcacactgtaatcccagcactttgggaggctgaggtaggtggatcacctgaggtcaggagttcaagaccagcctggccaacatggtgaaaccctgtctctactaaaaatataaataattagccaggcatggtggcaggtgcctgtaatcccagctacttgggaggctgaggcaggggaatcgcttgagcccgggaggcagaggtcacagtgagccgagattgcgccattgcactccagcctgggcaacaagagcgaaactccgtatcaaaaaaaaaaacatcatttttttttcttttttttagtagggacagcaggatctcactatgttgaccagactgatcacaggacttttttagccacagtcccaacatgttacccagactgtgcaggcccagcagccatacccactctgaacttcctcatccttttctcctcctgagtccagatctgctccctcatcaccttctcatcagtcctcacttcatatctctcttggatttaagactgtccaaatgtatcatttcaaattctcaaacactacaaagtcatagaaaattaaagctggaactttaaagatcatctcttcattttacatatttaaaaaatgggctaaaggaagaattatttgagcaaagccacgcagaaagtaagaggtcaaaccaggtctgggtttctttccagtttattgttggtggctttctttccactactgtggcctgggccaggagaagggtgaaaaaataaggttgttggctccactggaggccataacttgttttaaaagttcttggaatagtcaattcagaaatggtgagtgacagatgtggtttggctgtataaagtaatttacatcatctacttactccatatatggatcattttaccacatgataatgtatacacatattctgcatatatgcaaataaaatgaccaatatgcatacttattgtaatgaggtatagctataaaatattcatagaggcaccatgttgaatttaaaaagagctttaaagttgagaattttgcatcctagtttgtttttttttaacctattgtgtgctttttgccaaatcaattatactatccaggtctactttaccaatctgaatattgcagttttctgaggtcatgttcaattccaactcctctcagcttctagtaaaaaacctgagtataatttgtcaagtttacctgattggtagtatatgttttcacgtagcaaagctttcacattttgctgcttctgtaagcctggttgttggtacttaacattaaaaagtcagaactactaattatttatttcttgaagaaaaaagaaaacattgtaacttttctaaaatgattcggtgtgacatgatcaccagagtgacatcccattacttttgccacattgtattggttagaagcaagtcacaggtcctgcccatacataagggcaggggattatacaagggcatgacaacagtggccagaaattttggagaccatcttagaattctgcttactacagactgtcatgaagaaagcatgtttgcagacataaagaagagattcttacatgtcattcaacatactgtcaattcttcaagtttatagattaaacccctgaaataacttttttaatacccacaaagatactgtctcttcacttggtattaccccgccccccacctagttactagtggtgttggtgacaaattctaaactttaagagcctttttaaaataatagctctttgcattagcttagtgccaagttgtttcatctgaaattgctaaatcttgaagatttttttcattttatcaccttttttccactgaaattcatgatactaaattccacataatttcccctatattcaccacacatattttttctttcatttaacatcatcttcttaaatttgggcatgcatttccccaaattttgattcaattatggttttccaatacattttcaaaattttttaaattttcatttatgtatttatttattttagaaatgggatccagctataatgctgaaattgttcccaaacttataagttcaagcaattctcctgcctcagcttctcaagtagctgggactatagggagttttccaatcttttaaataatattttaatcaaattttttcatgtatcatgcataaattagatgaaagtggaacttccctgcttgaattaaagccttcagccacttaaggctggagtgagatctctggagaacattggctggaaacacctcttctgtcatattagtaggacagatgcctttcattgcaacatacatactgaatgttggtataattgttgattgaaatttagctgtacaacttatgatctgcagatgatagactttctctaagttctaaagtacattaaagactaagcatatagcattttagaaataatttatacaaattatgtgtttaagcttaatgcctttcttgtttttataaacttactatcatctttgagaaggtctgggtgacttttatattaatgtttttatttattttaatctattgactatgtaaaaggtttactatttgtttaatttaattttaatttctgtattgtattccttatttaacatgccaatcaaaactcttgttgttccccatgttttggctaaaaacagtttagttcggtcacttgtgaacttattttattttgtttgtttttctttcctttcttacactaatgctcatttatttacattatatataaatttctagaaaaagcactaacacttctctcaggttatcatagtttatctagagtaattcattgacataagccccactgcttatggtttaatctttctaatagtcacatgtcactttttctgatgttattatgatttgaaagtaggggaaaattcttcttactattatgagaatcagggtctatcataagggttagccatgatgtggcttaccagcctccctttgcaaaatgctgacttgcgaagtagagcttaagccaaatatgaataccattttttaaatctaatttttaatcatatattgttcctgaaagatgtatacacttctctggatcccaaacattcaactgctccatttatttacaaaataaaaatgacatgtataaaaatgtcactttaggtgccttgttccagcatgggttcattgtttggagtgctacatcaatgttttagcatgagctgcacttgtaattcatcatctattatttctgtttagttttttttttcccccagaggacaaatatcttaacgaatcatataaagcaacctgaatttagtatcttctcagaaatttatatttgtaactatttaaaaagtaaatattcacacctaattttatggttttttaatgtacatgtatctatgtgggggatttaccggtgttacgtttattcaatgattttgacttagtttttataaatacaacaacactttttaaatgcatttttcaaattctacaagattaaattacacacttacagtattttagaatagtgtaaattgatttgaaaataaacataacttattcttgataagcataccattcagctggtgaaaatagaaatgtgcagatatcctaggcagtagccaacgacctgagcaatttttgcacatcaaggtcatcagttattgtattttactgagaaaactgcaagtgtcattaattttgtaagtaagtccattagaatgaagagaagttataataaaatatatgcccaaagtagtccctgtaaagtgttgaaaggggtttaaataagagagcaattattactcttccgcaatgatgggaggaaaaatcactaggagaaaaagtcagagaacattaagaagttcaccttgggccgggcgtggtggatcacgcctgtaatcccagcactttgggaggccgagacgggtggatcacaagatcaggagatcgagaccctcctggctaacatggtgaaaccctgtctctactaaaaatacaaaaaattagccgggcatggtggcgggcgcctgtagtcccagctacttgggaggctgaggcaggagaatggcatgagcctgggaggcggagcttgcagtgagccgagatcgcgccactgcactccagcgtggacgacagagcgagactctgtctcaaaaaaaaaaaaaaaagaagttcaccttgattaacatacagcttctatctgtgaaagacaaatttgggagatttggttggaactctaagttgaaaacaaaaacttcatccatcactaatatctgaaacagaggtattcatctattcattcattcaccaaatgtttgttagtcattcaccatacatacactaagctttgtggaccacaaaggtctaagtcacatgaggctagaatgaggatggccatttttatttatagttaaacaaagaaaaggtaacaagaataaacagaaatttcataggaatttggaatctgactgagaaaatagttatttcagagataaaataaggaaaactgacttttgattactgccaatgtttgaaataagtaaaagtaaacaaaaaaatttgagtctgggtgctgaaagagtgatattgcagaatcaggaatttggttaaagaagtatgtttaagattgtttaaaaagtcattacttagattgagagcatactaaatttgagtattattaggcacacctccactttcctacagtagttcagacagactgtagaatatacttatattgcttaaaaaatgttttaaaattaatttgtaaacatgtagaagatcacttgtctagacctgcgaactttccaagtgcagatattccattggaatgctaataagggcatttgatcatcttttaaatcaccttaaaatttctgaaatatggagtgactccaagctctatgcattaaaaaaagaaagcacacttagaagtatattgtatccatccattgtgactatctttggctttgccattaatgttttacaatttggagaagtaacactattcaccaattcctggatctacagcccacccatggtcccagtttgtttataaagtagtcctcatgaaatagcaaagttattcagaaacatttaacatattttaaatataagataatttagagttcatattatcttgtaatgttcatacaatcatacagttcatacaatcttatgttattaatatccactacattcttcaagagttaccaatgtaatatgggtacttacaagcgcttgctcatgtacttaaaattagtagtaagttttactttcctaacatttagtagacagggtagagttcgtgtatgtccaattgcatgccaactcttatattgttcaattttccattttgatgttattctcatattgtgttacatcatcattacactatcttggttgagtaactcaaagggataaaataggaatggaaatcatataaacttaaaactcaggtttttttgtgaattgagactctaatgaaaaaacatcagaagaaccataaatctacatgtatttttaaaaagtaattctgtaagagtgaccatcttaggtaagcatcctaaaaataaatgtctaaataagaaatataagatgaatatctgaatattaaaacttattgaactgttgatctatttgtcttcttcagagaatgccattttgaaaatgtgtcaaaaagtaacataaggtcttttgggttctcgtaattttcacagaaaatagtcacaacttaggtaagtcagataagtctttgtcttagaaaaagtaaaaaacaatgctttaattcataaagtgaataagtggtttcacttaaaggcagaataaaaatcaatgcttcagaggtatcattaaaagtagtattcctcataagaaaacaaatatggttggcaaaaaagcaaaactagttattggcaatactttattatcagtgtatcagtatactttaatatcatgcaataacaattgcatgatattactagtaatcaaggaagaacaatttttatgtacatgttcatgccaggatctaattcaccttacaattggataaaacacttatgtgcaaagaatcaatcatttatctgtggcacttacatgaagattaattactgagcaactttttgttctgcttattactgacaacctatactgatgaagagtagatttttatgctaatattctattattttgtgagtcttggtatagactggaaaactatgtggggatcagacctagcagataacaattatatatatagaaggtaggtttgctattataattctttgtacctgaatgcctctccacacaaatttattcacaggaaataatatcctttctagttcttaattaattttggcgaaaattgttaaaattctcaaattccactctctaattgtttcatgaagaatgggcatttgcttttctacagtgaagaacaatgggtgatgaaatgttgctcacatggtttttataaagtatgtaatgaatttcattatgtcccggatagtgccaatcaaggtcatttttaaaatatgaaggcacttgttgaagtgacaagtcttagcctatcactttacggccaaatgatgaatctgtgtaatgttgaggataagacataagaatttcttcagaagatcatgtgatgttatgagtagtttgattgagaatgtgactaacgcctgccactaggtgattctcttcgtttgtcagaggaagaaaccaatgacttattcctggatatgttttaaattcagtgcaaatgctagaacagaacacaaagatagtcaaagctaaatgcaacccgaaagtagattatgatctatttactactgtctatcatgttgaacaatcaacttttcagcttctgagcatagtatgcaggcctatttaatgtgttagaatgttgaaattagtcttcagtgagaaatattttataatttcaaagatcatcttcaacctgaattcacagagctatgacagagctacatgccattataggtcctaattttctgtaactgtcaggtaagtttttctattttaagaaattaaaaggaaaggaaagaaggcaactagatatggacccagacatataagctatccttcttcaagcaaatacaaatatttcggtgaaacttttactgaaatatcaacactctcctatgtatgtgaaattcatattaacaattttaatattgtgtttaatttttactatttacaatatcgtgataacgggttgaatggcttgctgctgtgtgcactggaatgcctattgtcgggtctacataagcctgaagtttagaaaatactgtactagatttgatactccaataaggacaatagatatttcagttatcagtgaatactcagctggtagcatattgttggtgttcaaaaaatattagttgaataaattaatgaattaattacacttgccaaaaacttataagccagtttgctggtcttcagaaagagcgtcatgagtttttcctatcttaatatgttagttaatattttctattatctctgccatctttgtcttctgagaactctagaaagagaaatgtgcatcccatcactattgtcaaaatatgaaggatattgttattgttgttgttgtttaactagattttgttctttcagcttcacatggcacattaacataaacatgatttgtcagaggaaactgaattttcccacacactatttatctcattttacaacacttcaggctctaaaatacttgccagaaattgaagatgtctatttaatatctctaaggttgtttattgatgtaatttttgacatattttataacaatttctctccaaatgaccacatttatagtaaataactctgaacaccttaaccatgaatcttagtaacataagtgaaaacaacaggtagtatctgtacacacaggtaagacattgttaaagaaatatgtaaagtcaaacattaaactgcagaataacctaacgacattattttcttctaaggtaagctttctctttctctcctgctccttttccctttctcttcctccctcttctcttccctgtgtcccctgcttctctaatccacaaggcagtgttttgctcagtacatgtggctgatggccttttgtaacctcataacatagcaatctgatttcaagcttacattgtgaattatggtaaaagggttagcacagacaatgattttcttatttcttccccttattcaatctctctttttctctaaaaatatctctacctcaagaagaataaaaaacaaattcatagtaataatcctttcttggcaggcaacttattaccaaaattaaaggactttactttctatgtccatctcacttacagaaactgaatgaaagcagtagctcatcagaaggtagcactgtggacatcggcgcacctgtagaagaacagcccgtagtggaacctgaagaaactcttgaaccagaagcttgtttcactgaaggtaaagaaaagaatcctaatgttaatctttcatttggagtgcagcttgtttagctgttggtcagctaaaataaatcacatataataaaatggcactttgtaatagatataattcaatcacctctaatatgttgacagacaaaaaaacttaaagtctagtgtcatgctttgattatatctgcccaatatgtggaagagattaagaacatggaggaaaaatattttagtaccatcaaaacttctaacttatatttttaaagtaagtagtgatttcacaataagttggcatcttagacactactgaaaatgatcctacacagaatttgccttaaaagtaactttctgactgctaaaactaaacggattgctagtgctaaattgtgtttctttaatgaaaacatcagtttccaataattgttggatgaaatggggaataaatactgccctagaaactctatacctaaacagtcactagttgagcctggtgcagtatgggcaatagatagaagagatatgtttttcctacaactaatatttcctgtggtctgatatccctgggaatttgaggtttggaaatatgcatactttctatttgatgttattttttcataggcctagtataccttcagtcttcttctattccctatacaaatcatgcatatcacttaatgtccttttcaaaactgccctcatctgaccatggtggaacagcagcttgttcctctgaatggctgtaagaagtatttccatttaatttacccgataatatacattatcctatgaaaactctttctctttttgaacagttacatgttacttttctatcttttttctcttcttttcctccattccttcactccttagttccttctttcctccttcccttcttttcttcctccttttctccattcattccctttctcctttttcttcaaacatatcttttcctccttttttttttttttgccttggagcagggatcctgtatttatatctttttcttttttttttttttgaaaaccagattttttttggtaaggttcttgggagtaaggtacatgttcggtgcctttttgtgtgtgtacctaagtgcctttgtgcttacaatggtactcagaagtacctgttgattgcatttagactaagtgaaagcaatgtgtgaggaaggcaatgaaaagtcaaagccaaatcatacaaattagcttttagtgaactaaattaattatgcaaattacataagcccttctaggcacatcacaaaaaatcctaaatggtaacaaatgcagcattgttggaagagatctacatttttactctatatcctttataaaagggaagttttctgcttaacattattaatgtccaatttaaagttcttttctggagtgacttcaacagagtgcaacaggatgatatggtacaaggaaaagctacctcacatttatttgtaatttacaaagtttctcttggacaataacactgtgaggcagacaaagcaaatactgtccgctagggcatcatttaaagtggctgaatgtttccacaacttcacacagctgatgaatgtgctcttactactctaggcttagagagctatgctagcaagacagagatgagcatagtaataaaaagacaagacaaggacattgctaaaggatattatggaagcagagacactttatctacttttatttcaacactttctgcaggctgtgtacaaagattcaagtgttgtcaaatcaatgtggaagaaggcagaggaaaacaatggtggaacctgagaaggacgtgtttccgaatagttgaacataactggtttgagaccttcattgttttcatgattctccttagtagtggtgctctggtgagtgagattaagaaaaggtgatacagcactaatttttagaacactctaatactgatgacttattaatcctttgtttcattgtcttagtatccaatgcatttttaattatcccaccttgtatcttctatagatttactctataactctatatttctggattaacttttactatgtatgtaaatataattttaagaagctaatcattaatttttgcttactattaaatagcccagaaagtgtagcccttcagcttattcattaacaccaaaggatgtgaatattcaattactcattgtttaattaaaaaaagttattggaagccctgggatgggaatatatattctctgagttctgacgaattttgtttctaaatggtatttattattattatctcttgatggacagtagtaagtccttagggaccacttctctgtctttttccaattgtgtgctcactatttttgtgctacttaagaaataatgaaagttggtaacaataaatattgggcagcatgcccaagagattcatttaaggatgggtttatctttataacaaggtgttcacttcatcagaatcaatttatttttataggaaaattatttataaaactataaataaaacatacagatagcattttagggaaacactaacacaaaggaaataccatagatagaaaaagagaaagaaagagagagaaacagagtttgcctgattgaaatgcaagtgtgttacaagtttaactttttataattctaacacagacatatatttacctgtaatttttctgaagaaagaaatattttctacacgctactttagaagtctttcaccgttgaaaggaatgcatacttagaagtgaaacatcgagaggttcataatagaagaatatatattagaatctaaatgaaaagtaatttcatttaatcattgtcacactgtatgtctgttgagaaacataaattattaaaaaaataacaaacaacaacaaaaaagaagcagatgaacccaactatttagtcaaattggagactgcgaagatcaatcacaatttctgctttacaaaagcacaagctttcattatttcttcaacctcctttctatagcaaaaaaaaaaaaaaaaaaaaaaagccaatagaaggaagcaaaataaatgaaacaaaaggaatacataacttcaagttgggatggccacatcaggatacaacatcaagaactatttcctgactaagtcaaattaattcattggaatcatacttttctttttcttccaccaatagtctttcccctgattaaataagtaaaagacctttgcgaggaaaaaaaaaaagtaacagtaactactgtttctctgccctcctattccaatgaaatgtcatatgcatatgattaattttttaaatagcttatggagtataattatttttgaaagctaataatgtgtaacattttctttataggcatttgaagatatatatattgatcagcgaaagacgattaagacgatgttggaatatgctgacaaggttttcacttacattttcattctggaaatgcttctaaaatgggtggcatatggctatcaaacatatttcaccaatgcctggtgttggctggacttcttaattgttgatgtaggtatcgttcatatttttgtctctgttcaaggtagcttgtcttatttatattcaaattctacaatagtgagtctcagaccactatgttatgttgacagactataataaccactaaacgcatatatgcaatgagagtgtcatttctggaagacaagggctaatttaattctgatttaaaataacattgggggatggaatctatggtagttctctagttatctgagaaagctaaagaaaaaacaacacatcagcagtttgtagggaaagtagtgaaacagggaacttaaaaggtatgttgcttaaatcctttatgttgtgagtcagacagactcaagtttgtatcccaggaccatcacttgttgattttgtgccactgagttagtttcttggccccaaactcttgacccccaacttgtacagtattaaaggcactcaataaaaacagtgatgctgttgggtgctacagtcatttaaaaaaattctatttgatctactcaaactttttaaagagtagatttaaatagtagattatatggattatgacttcattataggaagtaaggtatgtagagtgtagggaaagagaagtctactttattcagcagtgaaagttttcctagaatgtaaactagatttacggcaagcccaaacagccctttatagaatttgtatccccaatgattaatactgcatttactgaaaacaagtgactgacttcaagatgtgttaaagttaagcatcatgttttctattatcaacttggcaaaatttcagctttagaaagctacagcaaaactatcctgatttcatattgagtagttttaccccaaaaagatactaacccagcaagactatgagggtttcttgtggaaagtgtttcttgagctaagaatcatgaatgcattatatttccttgaccctgaacaaaggcaaaactaagctatttaaaaaacttaacaatgttactgtgaaatgagccaattgagagaaatctcaaaggaagaattgctttatcacatcaataagggagaaagtttgtaatattgaggtttcaagcattagaagttacattatgtttcaatttcagaattgtttacactataatttaaatctaaatgtaatttaaccctttaaaacttcctgaggttttttttctattatgtttattacacatcagctttttcatgaaagttttttagtgtcatttttgaaacattttaagaaaataattttatagaaaattttgtagtttgtaacaataatatctttattttcaatgttctgttttaattctttaatgaagatcagtatagcactctataaaaggactaattacagcacatctcaaataatgtaagaagtatattaaatatgatacaattaatacattttaaaaaagaaaagtttacaaaaatagtgtgcagtatatgcggaattctccaatactagcatctttctaaccaaataagttataatcttccttgaatacaaagttttagtaaattccttatttagagaattagatacgtaagatttttcctttagtcatgtatattacctacaaatgaatacaaatgaagtaaatttattgctgtgtgtatttggtaaatattcattgattggccctttggggccagatatcatggcagaagccataaattagtataaaaaattttgaggaagttttgtaatggaatttctttctaagttacttatgtaaaaataaacaagtgaaaatgcaaggtattaccaagacaaaatatcaccttcaaaactgatgtagttcattaatttctgagaataccaattatgattagttgaatatactgatgcacagtagaaacttcctgctttttttagtacaacagcagtttttgtattttataactagctacaagaaaagccttaaattcaacagcaacttaataaaataaaggaagaatagccaatgaatttttttccaccttgatttcttcttttattttactaatttttactttgctttttttttctatttattcagttgataaattatatgacatttaaggattttttttcaactagcttttaattaatgtcctaaaaattacatcctttacatcaaactgaaattatttctttaattttttaaaggtttactgaaaatgtctgaacatttatcctctgaataattataagcaaaaattatacttgttgtattatatagcaactacacattgaatgatgattctgtttattaattgttattatttttgtgtgtgcaggtttcattggtcagtttaacagcaaatgccttgggttactcagaacttggagccatcaaatctctcaggacactaagagctctgagacctctaagagccttatctcgatttgaagggatgagggtaagaaaaatgaaagaacctgaagtattgtatatagccaaaattaaactaaattaaatttagaaaaaggaaaatctatgcatgcaaaaggaatggcaaattcttgcaaaattgctactttattgttttatctgttgcatatttacttctaggtgatatgcaagagaaataggcctctcttgaaatgatataatatcatttatctgctgtgcttatttaaatgactttatttcctaatccatcttgggagtttccttacaaatctatatacaaaaaaaagctgatgcattattaaagtactatgtgtaatgatataatggtaatctaaagtaaattctatatcaggtacttattctttgtgatgatatactgtacttaacgagttttcctgaaaataatgtgaatcacacatgtgcctaagtatgagtgttaagaaaaaaatgaaaggagttgttaaaacttttgtctgtataatgccaaagtttgcattatttgaatatattcaagattagatggttagatattaagtgttgactgaatttataaaactagtaatactaacttaaagattacatacaaatccacatcatttttataacaataaagtaaaacacttataatgaacagaaaatataattttgactcattactataggtaatttatacattaaccttaacttgcatcttattggtcagagtcacacaaaatgttattttatccttttcaaagatgcaataatcattttccatcatgcataacagattagaaattttgccattattgacttattttccatgcctttttttacggcatgaagcattagtttatagatatataatataaaaaattagttctgcttttttttaaaaaaaaatattatcaaaacaaaacactgaattgtgtgattccaatagaaaaacactgctctttcacctcctaaggtgtagttacttttatggaaactaagctgtattgtagacttccatttgcactttgtagattgtttatagccttatgttctcttctcaagtcttattataaatgtcactttgtaagaacgtaggacttgtcttcgatttccctaacatatatgaaaactttgtcctcattatcgacaactcagaacaatataatacaagtagtcctcttttatttctcacagagagcctcaaattttcaccaaaatgttaacagaaattatctctggggtgtataagaattaagtctgttttccaattaaatgtcactttgttttgtttcagactggcagtttcagttctggagaaaaaaaatgtcatttgtgtacattctacttgaaaacatgttgcctgaatcaaaataatatattttatatggcttgtgaaatctgaacaatgctaaacatttgaaaatattataaaccttttacatttgaccatttgaaagtttattaaattcattggtcaagtgctcagatatttccatacattacacttcatttctataaaaaagctgatcttatcggtatacttttaattttctcagaaataaccatatctataattattaatcaataatgccttttatattaaaagaggttagtttttgaaacttggagttttagacataaaatccttataaatgctgatagtgatataactaatagtttaaatggtcagatttatgaatatggctctattcctcataatgacaacatacacacagcactaaaatgactaatctcttcaatacgtgtttggcattgtagagtcaaaataacgttataattgattctattttttatacttctagtgtttggatattttattttgtaaaaatataatcatgaatgatggtgaggttggatataagaatgatgattatgattgggaagtgagatttgaacatgctcagaaactctcatttaattctttgccctagcagcataaaatcacaatagctgcgtcaaagcgtaactcaggcactcattttatttttgttgttctgttattttttcaaagcatgtgcttttatgcaacattactgaataaagcatgttgtacagtgcttgataagaagttagaaagtaacaaataaattatcatcacgttgcactttgtgttttgcatgttttatgcacatttctggctgacagcttttaaacatttattgtatttcaaatttccagtccaaatttttcaacttgtaaaattaaactgagtgaattgatgtcgtgaatatctagggtaaaataaaatttgtgtttaaatttgtatttttaatttcctaacctaggaaatcttaaataccttctttttcaaaagaactcaagtcttaatggatagggaaacagacggagagcatcatgaacaaaaagtaacaccaaatgttctgtcatatcagatttctaactaataacaaactatatatttctattttgtataggataatcttgctccaacttggatggggtggagcgctggttcctcccctgagccctttattatgggtactgtattaccccttttgctacctttaatccttgcactgtgacttatgtgtagtggggtgagggagggattgggaagggtactattattgcaccacagtagggaaaatacattatttacatcctaatcccctcttttcaattgtcttaaatttcatttgaaaaaaaaaaaaacctttatgaatttaccctctgtggattttaaccccaatggttgatatctttattaagtttcattgaatatgatttagttatgtgtatatggagttatccatctttggggagattactggattggtgagggcgggggaccctggtgtagaatgattatgtgaaaaaacaatttaacttgttaagctcatgatactgtttgaggcatacagcccctgctgtttagtacattggtctgggtcctgaaaattaccagttagataccatcagttgattattgatatgtatgagcagatactagggtgcaatatttcaggtttcataagactggtattgattgtgaccactctcattttttattgtgtaagttcatatggggttattttcaaaatgttaacaaggcaaaaatatattaagaaatagttgaataagcacatgtgaattgtgttgtaaacaaaaagttagaataaaaaaatccacttatttgaattatgcagaatagaatacatacctagaaataaaacaaaaacgtcttatcatgagtattaagataaaatttaaggcataaactcacttcttagaataagtaactcccaactaactttctaggattttaaaacataacacagtgaaaacatacataaacataactctacattttatttattcttaaagtttaagtgtattatacaagaagaagagtttatattcgagagacagaaaaagtcagaatttttgtttggatcaccaatatatcatagcttacaaaaaaactgtcttaattaaaacccacaacataatttttttagatttttaagaaagattctattattcttctttatacttaaaaatggatgattcctactttgcccacttttatttttattcacatagattttctttatttctattagagaagcactagaattcatgaatagtgttgatttgaagttcaaagtaattaattcagataaaaagacatttctgcatgtatgaaaatttctaatgtgaatttgcatatttaattatcaatccttcatttagtgtagacttatttttaaaaatgcaggtaatgaaccagaaatagaattggttgtgctagagtagagaaactttatttgatgattgttttgaaaaaaaagcttctgagaagaaacaacctctagtacagtattaattcattaagatagctcctttctcagacatttcctttcatgtagcctgaaagttcaatttgaaatttgttctttccaatttattcagactaattctgcctactttcttccccccataagaaccaattactgcagctttattgagactgaaaaaagttaatacacctccttctttgctgaaccaaggaatggcttggaactcttgggaaaagacaatcttttctatgatctttcattgtctaatttaatacatcataaatatgactatagctttgtataataaactccccaatactgtgccagatgttttctaagataaagttattttatgttcacaaaaaaaataaaacttttctctgggccaaatgtatgccaactttgcaaatcatatcctgaagtgcactgctgcagagtacatgcttgcgtcataaattccatagagttcgctttaactctaaatcaatccccagtttcaaagtaaacctctcaaacatattacctaagcacaaacttctccctgtgctcagttccttaattattctcatcccatattcagaaataacatttaaaaattatgctttgatcaataaatactaatctaaactttgcttcattaacccattcatttttgtcaaccattattttattcctatattcaaagctctctggtatgttcttatattcaagacactcaaggccctggaagattcacgaacatatgtttgcatcttaaatttttagaaaatcttacaatctgtcaggattacactgaactctagtacagagtaatatgggtaccagataagtgggagcaactcttccacgtagactggaaacagcactaaatgctatttataggctactttctgaacttaacttgttttaacctcatttttctcatatgccaaatgagaacgcaatactgaattatctgtacagttctgttcagtactagaattctgattcttgaattcaaaggggaaaacattcctctttattttggaggctaaactgggggacaaagttaggctccatgaaagaagtgctatttgaactaaagcctttaagaggggagagtatttcagaagaggagctattagacaaggaatttcaatgtaaatggcatctcaatcacctggcaattatattagcacacggttattatattaattgaagtggcatgaagtatagatgaccagggaagttaaaactggaaatatagattgtggagtgatgtgaataccaaggtaagaaaaatatttgttagttaccagagagccaataaataactttcaagtgggacttggggaagattaattcatcttacatagattaaatgaaggagaaggttaggagacagatgacagtgcaagtatgaaataacagagggcagttctaggtggtgactgtgagaatggaaaagaggtggcaaagctgagaaacgtttcaaagaaaaaatgtgagacaggtaatgtgaaaagaaaatcgagaaataggtatagataatcagtgttctgctcatactctaaattgggtgttgaaggcaaaatacgtattttaattagtactctgtgtatacacactagaaacagcattgtaatctggatagtggacaaaatattcagaaaagaagggaaatagtaacttgatttcaatttccaaatctctaatctgaaagaaatctaattctattcatccatttaaaataaattatataacgagaatttatgaagtccattgtattaatgcagacagtcagatgagataaggcaaagtgtcacgtgtcagcttggtagttgcatcggccacatcatttggttctgcctggataactcaaccaaattaatttttcatactcatcccctccacctttgtcattactggtattcttattttctttggcccacttatcacactgttttatgttccccagaaggcctagagttctttacaggctttaaacagggatcagaagtataagaaattggctcatgtatttttttttcagacaggcagttaaaaaaaattgttctaaaaatacactggcatcaaatggcaaatagaagatgttttgacgactacttccattggatcagactgacaagaataatacaagcacataggtggaattaaacttagctattaatgtccaagtttgaggcagctgccccttataagcattttagggtctgtttttagcttccctcttagccactcctgtgcagctccagtgggaggtatggaggaaaaagcaaggaagccatccctatgttgtttccaaacatgaacactcaagatttttaactagtggtccagaagtaaagagggggaaaacatccttctatagaaaaaaaaaaaagtagataataattgaacacagaacttcatgtgatcacatcagatttgagaactatgtatggcatccctctttttcttattttcctaagaaatgatttctattatgtttcatttgaaataagttttttgaattaaactcagtaaatgaaacaactgacatgactggagcttgaaataaacgatgtgatgatctaatgaaatacataatgcaaattgtcttgcttcttatgcaaaaattattagtcatagcaatgcatgaataattaaagacaattatattaggtatttaataatattttttatatttatcatctgaatttttaagttattttaaaaatatattggtcaaatcaactcaggtccaaatgttttagttttgttctttaatatattgcctttttaaaatgagttaaacttctgtataggctttttaacttttctttattctgataacacaattctgacttcatctggcagcaagttcctctgattttccttttcctttaaccttttaatgcttctccctcccttttttttaaaaacatttttgtttcatttcttggttatattgcctatagttgttttcctaagtgtattgcttaagaaaaaaaaatgaattttaagatttttttgaaccttgcttttacatatcctagaataaatagcattgatagaaaaaaagaatggaaagaccagagattactaggggaattttttttctttattaacagataagaattctgacttttctttttttccatttgtgtattaggtggttgtgaatgcccttttaggagcaattccatccatcatgaatgtgcttctggtttgtcttatattctggctaattttcagcatcatgggcgtaaatttgtttgctggcaaattctaccactgtattaacaccacaactggtgacaggtttgacatcgaagacgtgaataatcatactgattgcctaaaactaatagaaagaaatgagactgctcgatggaaaaatgtgaaagtaaactttgataatgtaggatttgggtatctctctttgcttcaagttgtaagtgaacactattttctctgaatatttttattgtttggaataataacaaaataatgacatacatctattatttagttcctaagaaaaagtatatatttctttctatttaaaaaatttcaatttgttagtacaagtttatgagcccagatgggtgaaaactttattacatgtaaggactgcagatatagtcagtagtgaccagaccaaacaaagacctctttgtcttttttcttgtattttctttgtttctatattgctctttctatataaacaagtaaattaataaatcagtaactttgccattttttattgtgattagaaggcttgtttccctgatcagctaccaaaacggaatacacttaacagatagatcatcttccaaaacacatacacttaatacacctaattggattgtaattaattggtagggattaactgctgctgagttctattatttggatcaaagtttggggaatgacatttaggttttagaattagaaccaggcatagcggtgggtgccactgcactccagcctgggcaacaaagagtgaaactccatctaaaaaaaaaaaaaaaaaaaaaaaaaaagagagagaattatacctggaagcaactagaaacaaaaatgaagcaaaagcagctgttgtcttatctcaaatgacctttcagcaccattatttaagtctattttgtcctaaatattaatgttttcactactgggtctctaagactgggtctccaagaaaaatagtttataatttatatttaaaaaaggtagccctttaaacattttcatttgattctgcttctagctgcagcagcaccacaacaaagcagggaataaaataagagtccagattatttgaaaactcagcttaaaaaaaaaagactgtacaatttctttcttcccttgtggttctacagtgtctttagggcagaaatcaatttttgctcaccaaggttatgatttcaactgttcaaccagaagactaactaagcaaacaaaccaacactggtcaaaacccttttgcagctcttccagaggtgtcaactatgattactttacaaattcttcccacctttttgttggaaattcttatttctcttcttaacatttttgatctactctgaataatattcatgcaattaaaatagagattttttaaatctggtaagaacgggtggggcatggtggctcatgcctgtaatcctagctctttgggaggccaaagctggaggattgcttgaggccaggagatctagaccagtggaggcaacatagtgagaccttgtctctaaagacaaataaaaacaaaagttaaaaaaaatctagcaagaatgctttctttaaaaattgtcgacacatgatgatatttatttgggcacttattctaacccttaactaatgaccatacttgtaaatatcactaaagcaaccacctcctccataaatttgaggaaagaaaaattaaaaattttaagcaatcctttaaaatgtaagcaattctgaaaatacagtgatggtcctgcacaaagctattaaataaattctgccaccaaaaaaaaaaaaaaccctctaaaatactgcttcacatttggcttttatagaatcacctctctattgattagtaagtcattgaaatggtcccttgaatcacttttttgtttctataccaagtgtgtaatggaattgttctatcattgacctaagccactgacatatttaacacatctctctctctttcatatacaaaagccttgtactttctagctaggaatcattactttcttttcactgctgtcacccacacccttgcttagcttttgtctcatgaaatccaccacctcacaagggttagcgttatcagaacaaagatatattgtgatacagacgctaaaggctttgctaacctccctcactagctaagggataatccttttaggcccacaggactcaaaattcatgccccaggacaagtaacaaattactgtaagttgttagcctgagtatccttcatcctgtgagtgccaagtgtctgctgtactattgttcacatttcttattcatattaacttattatcttcaagaatttcagaaagaaaatagaatagggggttatttctaaatgttttgatgcaaaattcttaaaaggattgtatttctaaatgttttgctccaaaattcttaaaaggatagttgcaaccctgcctttatgtatcctggtactatccttacattgttacaataaagagaaatcttaaattttcaatcactttgatcaccctgcagataaattttagcagatgatccttagatctaagttgtaattatttggctgatagagctattgacccatgtgttggcatttgtaagactttctaaaaagtgctccagcaaattttaatactgctttaaatatcatgacaccatgaactctaaagaattgaaaagtgcttgtgagttggttatcaaggggaggatatatcaaatggccattttgttcaatatgtgttctagaaatgaaaagccatactaaaatactgtcttggtccaaaatctgtgtaaaatttgttttgaaatgtctttcaaaaatattcccttttgaaaattatatcagtaagaatatttattaaacatcaggtctaaattatttttactccaaagtaaaacatgcatgtccttcttaataggccacattcaaaggatggatggatataatgtatgcagcagttgattccagaaatgtaagtattccttgtattctaagtctttttacaatattgatcaggtggtaaaattaatcgaataaagcataaacgaccaaatgaaatgattctatcttgatttaaaatatttgggaaaaagtgtgacaggtaaatattcaagcatagcaatgtttatcagaaagatcttactaagataattcaacacatgaattattttgaaaaccaaagtaacaaattcatgtatttagtaactaacaaatattttccttttaaatattttctattttgtttcctatttatccacacattatataattagtagtaattttagtgtgcgggaccaaatttgaagaaatatatgatttctatcattagttgaaatgtatagtcaccctccatattagacagcatgaaaagttatggatattgttctgtcagccttagattactgtgatgatttctttcaaataatcctattttaaaccatataaaagaatgtttttatatgatttttgcattcataaattgactggagcctttactaatgttgcaatcacttctgtgaccaacagattcctttaagtgtatatcaccaaaatataaacctattttatttgatttcagcctctttcaggctccaagacctaaactgaaattcatgctcattccaactttgctcttcaaaactttgtaagatgtagtattttctatcaaccttcatctttctattctcaagtcccatctgtttagtttatcatcataaagaataacctctgtccctgcagtcttcaacctgatagagtttgatgttatctttcttgaagtgcatttcaaatagctttagttttatgttgaatatcattttgataacctccagagttgttttatttcactttgtcacttatattttgttttgtgtgtttagttggtttttaactttgttgcttttagaaggacatgaatctgttaaaaaactatagtgacctttcagtccattactaaattataagtaatagcccatttgttttaagcacaatctaggaattaaataatcaactgaggatttataaaatggactgtccatctatgtctacttaatctgaaaaattcaataactgttactttagggtaaagtgccaaacatctgaatgaacaactcatttcttatttgctacattatttcatgcatacatgaatgactgtttctaaacctagcctgtagatatttacagttttaaattttttattaataattttaaaattactaaaattcagtaccttaaaagcttgcaaatttagcacattactgttcaaatggaagaatattatttgtatttatagttataaaaatagattttagaatgtcataatagccatatttttcacatgaaaacatccctaaaggccaatttcagggatgttttttagaggtagttgattcagaaaaaaaaaaaatgctgacatattagtaagaataattttttctattgttatgaaaaagcaccagtgacatttccagcactaaaatgtatggtaatattttacaaaatattcccctttggtaggtggaactccagcctaagtatgaagaaagtctgtacatgtatctttactttgttattttcatcatctttgggtccttcttcaccttgaacctgtttattggtgtcatcatagataatttcaaccagcagaaaaagaagataagtatttctaatattttctctcccactgagatagaaaattattccttggagtgttttctctgccaaatgagtacttgaatttagaaacaaaatgggagtatatattataactgatttttccttcctcttcctctgtcattcactatccatatatttccggctatagaaagctaagaataactgtgttccacactcttgttcataggttcataaagtttttcctcctcttattcattatcaagaaacattttctatcttttaaaaaataataattagaataaaactagaaagcaaccgaatatgcctctttcccaaaagcaatttgttactttatccctacaactacccactcccccttgaaaatatattttccaactaattctttgcaataaattaggcactggatgtaagcttcttctagtgtttatttttacgcttttttctgtcattgatttcttttatatattcccatttctttctccaagatatttaaatacaagctatccgtttcagtcttgaattgtatgactattatttatcatttataaggctcatttgattgtcccaattacctatgtacattatagaacatatggaaagtaaataaatatcatcacttggaagtaactgctgccattcacattttgttttctgttcagagtatttctgcacatactcttattgttgtactttttatctataattataaattccactttagacttaacataagtattttctcattttgttaagtcttcatatatgcattatcataatttacttattcattccccagtaggttgataatttagattgtttttaatctttaatgatttaaatagtaccttgttgaaagttttgtacaaaaaaaaagagagagggacagaaaataaggctttaattatttcctgagaataaattcccacaatgaagtattttactcccctagagtaatataactactcaaactcccaatatcagtgtatgaacacccatgccaccgttccctcactgtcaccaaacattctgtttttgaatatttgatatttaataggtgaaaactgtatttaattttaatttttatgacttttataaccttaattgttatgacttttatgtattttattacatttgaacatgttcttaaatgctcattggccatttgtatttcttcctttatgtactgttgcttcatctcacttgttcagtaggtttgctttttgtataatgaatgagtgctttcttagactacagaacattctcccctcaattcccttttcttattaccagtagtattcttaagtcaatatcaggctactctatttcacttacttgccagtgttccaatcttctatccctactggtctgtcccatacttactatgctatgagctctgatttatcccctaaatctctcactaactcatccagttttctttttatccctttcctccaattcttgacagagttagagtgacttttttaatgagtaactccaaactgtcttgcagtatacatcctctaactctttgctacatttaaataagaaaattattgcctttaacatcataaaggtagtatgtatagtataaggtaccaagtatttattatctcagtgaaccaaatttcgccactcactaagcataaggtcttgggtaaaatacttaacctttttgagatttgggggtgtttgtcttcataagataataataataaagtcaattttgaattatttagggaattaaatattatcatacctaaagagtacaattttttttacattttaaatcccagatataattatactaatcagttgaattttgtatttctttttttagccatccattttctattttaacattgaaaaaaatgtacaaaaggacacagttttaaccagtttgatttttcttttctatactttggaggtcaagacatctttatgacagaagaacagaagaaatactataatgcaatgaaaaaattaggatcgaaaaaaccgcaaaagcctatacctcgaccaggagtaagaagtatcaaatgatatgggggaaaaatacaaaaacaaaaacttgcatgcttgtctcacaaaaaagaaagtagctaacatttccagtagaaaaaatttctttcacttgtagagcatcatctaaaagtgatgtttgtatcttttatgataatggtaacaacaaaaaaaattaaagaccaaaaaagaacaagaagaaatagaagatacacccttgacttcaagagatttagaagcaccccattacaatccatattaattggccaatggacacatagacaatgtgatgtgcacaagagaaagttaatcacacaactcaagaatggttgccaagtaatatcagggaaagaagtaaaccttgggatggggctgtaagaaatgcaatttcctaatattttaagaaatgaagtgttgagtgaaataacaccttacttctattttatttttcactagagatactaagtgttttaaaggaggaaagaattccagtatctactattcatatgtatggctatagagttaggtattactaatgtctgcagaagtcagggtcagtaattacagtttatgatgataaataacaatactcatgcttccatgatgaaataaacaaattgctatgaaaatgtacagctattatcccacactataaatatttttatgatgatgatctgagaggtttcagtaattcctagggtgcatcaaggaaaaaactactagcaaatattcatattgtgatgattgaatattgccttcctgagaatgatgagaaatatatactttctccattaaaatttagcactaagagtagaaatgaaacaacaatttaggaaaaatataagttggaaaattccctcagaattcctcagtggcccaaagaaataagcctgcagatggccttcagtgactagcagtggcagaaatgggaagcagaatcacagatcaacgacaaagaacgtgaagttttttttgacataaacatataggaaatgtcattctggtctcattatccttgtgcagtttcaggattctgtgtctgacaatgttagccaaggctatttggtagaagaatatgagtattgccatatgtggtatttaaatgcataatgttatagatgtgtcttggaaattccaaattctccttaacaattatttgagaatacaacaagtgaaatattaatagtactatattttaaaatggatgtatggtccagctgatcattggaaagtcttgaaaaaaaaattaaatgggtttcttaccttttcataatcttaaaatgttgatatgtgttgcatacctctggaagaagtatacagtgttgaatgtttcttttgtttgtttgtttgtttgtttgtttgtttttatcagaaaccttctttggataagggattgttattctgagaaatacacattagtaaatggcaatttaaataactaaattttaacaattaatatgctataaatcattcttacaaaaatcagggccaatgactactttgcaagaaactagaaagtcaattaatgcagaaagtacttaatgctaatgcacatgagaaaactcctttgttgttaaaagcatttctatttctctacagaacaaatttcaaggaatggtctttgacttcgtaaccagacaagtttttgacataagcatcatgattctcatctgtcttaacatggtcacaatgatggtggaaacagatgaccagagtgaatatgtgactaccattttgtcacgcatcaatctggtgttcattgtgctatttactggagagtgtgtactgaaactcatctctctacgccattattattttaccattggatggaatatttttgattttgtggttgtcattctctccattgtaggtaagaaatatttaaagttcttaaattcagttaaataaaagtgaaagctgaaacaatcaagattagattcaagatcatcccagcaatcagagataatcactgtaaatattttgatacattttatccaagtgtgtttgtttttttaacaaaatgtctcctactatatgtcagtattgtttcttattctatccatttagaacaatatacttagtgtaaatgtagtaaaacctcattcatttgaactagaactgtgctattaactaaaataaaaatgtttttgacatgttgagattgaagaaccaatatagtatctagatggttctgttaacaagactagaaatgtagtctggtactcacgaaaattgctttagagaatagacatggagtcaccagcatatagatattagtggaaagtggtttcaagataaggaaaagtattgcataaaaagagaataaagacaaggactaaacattagcaaatgcatatagtaggttctctgcaagtgtcatgtagagattttctagactaccttaaaaatgggtttatcataatgatgcacaagggaaataaggtggcatgggacatcatcagtactatacttcaaagcctggaacacataactagcctcatgagcaatagctcatttcattagacaaaactaaagctctagtaaagtaaaaagcatctgtctgtgggcctattcattcttccctaaacaggatgatatgattgggtcaatattttactatccaaaacgaggcacctgtgttggacagattttcatgccactcccctctctgaagaaactggccttatatccagctcattgtatatagcctttgattcccactaattataatccttggttataactagtgtggctaaggtataaaagttgtattctcacacgtctccttctctctctctctctctcacacacacacacacacacacacacacacactcttacacttcgtcttttcagaatgaggcatttaaacttgaaggcatttagtttcttgagctcttctttttaactttacaagtattgtttttatctaaaaagcaaatggagagagaagctgaaaataagaagactgagattacagtgttaggtacaggagaccaaaaagaattgaaatacaacattaagtacaggatactaaaaagagcatcaacctgggatcctttcagaaatgcaccagaacatacataaatgagtatataaaaatattagagtggaatttaagtaagtaccaagatcatggggagatgaaagtagcatcaaaagctaccaatactttcagatggaaaaggagtaaatagagaatttagaatatggcaatttcagaaaaagtcactgtatacatataaacttgtacctatactgttgggctgctactgttcggccaaatgtgcatttttaacttattttctttttaaattctgacttgggactttacataaactaaaagtagtttataaacatctcttaaagataaaaaaaagtactataatccttataattgaaattattgctgaatttcaaaattaagatttataatatattatgtacaattatatatatattatatatagttgtcatatttaatataactgggttcaggactctgaaccttaccttggagctttagaagaaacatatgtttattttaacgcatgatttcttcactggttggtattctcattgtttattcataggtatgtttcttgccgagctgatagaaaagtatttcgtgtcccctaccctgttccgagtgatccgtcttgctaggattggccgaatcctacgtctgatcaaaggagcaaaggggatccgcacgctgctctttgctttgatgatgtcccttcctgcgttgtttaacatcggcctcctactcttcctagtcatgttcatctacgccatctttgggatgtccaactttgcctatgttaagagggaagttgggatcgatgacatgttcaactttgagacctttggcaacagcatgatctgcctattccaaattacaacctctgctggctgggatggattgctagcacccattctcaacagtaagccacccgactgtgaccctaataaagttaaccctggaagctcagttaagggagactgtgggaacccatctgttggaattttcttttttgtcagttacatcatcatatccttcctggttgtggtgaacatgtacatcgcggtcatcctggagaacttcagtgttgctactgaagaaagtgcagagcctctgagtgaggatgactttgagatgttctatgaggtttgggagaagtttgatcccgatgcaactcagttcatggaatttgaaaaattatctcagtttgcagctgcgcttgaaccgcctctcaatctgccacaaccaaacaaactccagctcattgccatggatttgcccatggtgagtggtgaccggatccactgtcttgatatcttatttgcttttacaaagcgggttctaggagagagtggagagatggatgctctacgaatacagatggaagagcgattcatggcttccaatccttccaaggtctcctatcagccaatcactactactttaaaacgaaaacaagaggaagtatctgctgtcattattcagcgtgcttacagacgccaccttttaaagcgaactgtaaaacaagcttcctttacgtacaataaaaacaaaatcaaaggtggggctaatcttcttataaaagaagacatgataattgacagaataaatgaaaactctattacagaaaaaactgatctgaccatgtccactgcagcttgtccaccttcctatgaccgggtgacaaagccaattgtggaaaaacatgagcaagaaggcaaagatgaaaaagccaaagggaaataaatgaaaataaataaaaataattgggtgacaaattgtttacagcctgtgaaggtgatgtatttttatcaacaggactcctttaggaggtcaatgccaaactgactgtttttacacaaatctccttaaggtcagtgcctacaataagacagtgaccccttgtcagcaaactgtgactctgtgtaaaggggagatgaccttgacaggaggttactgttctcactaccagctgacactgctgaagataagatgcacaatggctagtcagactgtagggaccagtttcaaggggtgcaaacctgtgattttggggttgtttaacatgaaacactttagtgtagtaattgtatccactgtttgcatttcaactgccacatttgtcacatttttatggaatctgttagtggattcatctttttgttaatccatgtgtttattatatgtgactatttttgtaaacgaagtttctgttgagaaataggctaaggacctctataacaggtatgccacctggggggtatggcaaccacatggccctcccagctacacaaagtcgtggtttgcatgagggcatgctgcacttagagatcatgcatgagaaaaagtcacaagaaaaacaaattcttaaatttcaccatatttctgggaggggtaattgggtgataagtggaggtgctttgttgatcttgttttgcgaaatccagcccctagaccaagtagattatttgtgggtaggccagtaaatcttagcaggtgcaaacttcattcaaatgtttggagtcataaatgttatgtttctttttgttgtattaaaaaaaaaacctgaatagtgaatattgcccctcaccctccaccgccagaagactgaattgaccaaaattactctttataaatttctgctttttcctgcactttgtttagccatcttcggctctcagcaaggttgacactgtatatgttaatgaaatgctatttattatgtaaatagtcattttaccctgtggtgcacgtttgagcaaacaaataatgacctaagcacagtatttattgcatcaaatatgtaccacaagaaatgtagagtgcaagctttacacaggtaataaaatgtattctgtaccatttatagatagtttggatgctatcaatgcatgtttatattaccatgctgctgtatctggtttctctcactgctcagaatctcatttatgagaaaccatatgtcagtggtaaagtcaaggaaattgttcaacagatctcatttatttaagtcattaagcaatagtttgcagcactttaacagctttttggttatttttacattttaagtggataacatatggtatatagccagactgtacagacatgtttaaaaaaacacactgcttaacctattaaatatgtgtttagaattttataagcaaatataaatactgtaaaaagtcactttattttatttttcagcattatgtacataaatatgaagaggaaattatcttcaggttgatatcacaatcacttttcttactttctgtccatagtactttttcatgaaagaaatttgctaaataagacatgaaaacaagactgggtagttgtagatttctgctttttaaattacatttgctaattttagattatttcacaattttaaggagcaaaataggttcacgattcatatccaaattatgctttgcaattggaaaagggtttaaaattttatttatatttctggtagtacctgcactaactgaattgaaggtagtgcttatgttatttttgttctttttttctgacttcggtttatgttttcatttctttggagtaatgctgctctagattgttctaaatagaatgtgggcttcataatttttttttccacaaaaacagagtagtcaacttatatagtcaattacatcaggacattttgtgtttcttacagaagcaaaccataggctcctcttttccttaaaactacttagataaactgtattcgtgaactgcatgctggaaaatgctactattatgctaaataatgctaaccaacatttaaaatgtgcaaaactaataaagattacattttttattttattgtttgcccagtcactttttgttaacagaatattctaatgatatggagattttttacattacaaattgggggagaaggggagcgcgcgcgcacacacacacacacacacacacacacacacacacacacagaggcatacccacgttgacaacaaaacctagggtagatatgtcactggaggtagggggtaatgacctcccagaattacaagcagcaggtgtgttctctgttaggaggaagaactggtgtcagaggatagctagtgattctaggaggaagagaagtatggaagccagagtgatggtggatgaccccttgagctatgaaaagaaacccttaaatcatcatttaaaaatttagaattgccatgtgtgtaggatactgtgtttgctcctccagagccactctctctgcttctgcatcattctgtgtgtcccagaagggtgacttctacacattgcaaaaatgggctctcctacctttgagctcccaattggtttggccaatgagaagcaccagtgggaaagcaccagagagagaagattgacataggaatatttcttctccaattccttctttgctgggttggcactggactcattcctccccgaaaagtcatactccaatcagactgcccctcatacaactgaagctactttctctggggtcaggtaatcactcctccccttgctccttcaggtctgctgctgcattgagagtgcttttgtattccttgtagctttctcctaacattgctgacacttttgtaaatgtccccttcatgaaattcttctatatgcctcatttcagcatgccatctgtctcctgcctggctgacacaaggtgattcaacagctcatgaaagtcagcaggaagcaaagatgtgccttgcttcagcttggggtcttaatcttgctaacttttgcagataaagaaaaacagtaactgggggaaccacagtgaagtccagtgcagaattcacagatatcatggaaaggttactcgggtggtccagatagtaaaattaacagtctaaattaatctatctaaatttctgaggaacgagaagccttcccttgtcatcaggtgaagccagaagagggaatatagcctcaaccagaaaagggacagtaattaaaaggcttttcccatccttgtacaatggactgactttgcctcttcataacatcacaatcctaaagcaacacaacaattaattctgatatattagtagctgaaaaaaattcccatttccaactaaggtaggtcagaattataggataaaccctgcagactttttatactacccatccacgccattactcactgttacctttccaaatacaaagagaagaactggtaaaacataatcatataaatctccatattcattttgaaatatttggcatgatattttctgtgctaaaaagtaattattcttcaaagaatgatgaggtcatgtcagtaagacacaggaaccaactagaaggggcttcccactggccaaatctggggcaagttgagcatcaaaataaatgatagtaaaagattataattcattgaataagaatcagcaaatacatactgatgtaagtaaataaggaaaagtacaaatctgtttcttgcagttgaatgttaattaacaattgtagaagaaataacggagttagaaaaatcactatttggcaatcaccctaatgacaattgattcatacaagaatcatcaatgagtattaaaactcatgggtgaaagtttgatgaggaatagggtatttatagcatcttaaagtatctcttctctattaagtagaaaatttaaacagaagaaagtatactttggagaaatacagcagacaataccttcaaagatatcatcaattatgagaccaactgatactatgtgcctcctgataagatatactgaaagggccacattacttcttggtacacagtcaaaattttaaaaccagaatctaactacaaggaaaatcaaattgaggacactctataaaataagtggactgaactccttaaaaatgtcaatgtcatgaaagacaaagaaaggctaaagaattccatgaggtcaaagaactatgacaactaaacacaattctggatggaatatcaaattaaaaaataacagataaataatattattgggaaagttgaataaatttgaatatggactgtttattagttattagtattataatagtgttaattttcctaattttgttaagactagtgtgcctgttccatgaaaatagaaaatgttcttattctctgaaaatgcatgctaaagtatttaggggtgaatgcaacaatgtctgcagctcattcttgaatcagttcaaagaaaaatgagttacatttatatatatatgtatgtatgtaaacagacatagataaaagtatagatgtgtgtgtgtctttagaaaggggaggattttttttttttttttgctgtgtgttactgaagtgcctatgtctgcgtgttcacactatcatattttgtatgccctggactttataatttctaccttcaaaattagatctactgttggtaattaattcaatatatactggttttttaactactattctcatttcctagcagtaatcttcctgaaaagtcacagaaatgattacattccttgttcttcataataatcactgtttaattaaaataagaatattttagaaaagatctgcggcatagtggttaagaccccagtatttgatgctaaacagatctgatttggataacagaaggtggcactttgctgtttaagctggggaccagacactgtgggtataaatagtaattccaaacacagctccacagagcagcacccttatgacaaggttttcatatgtctatagttaagccagaaaattaagaataatgccataaatatttataaagctgaacatatccaagttaaagacctttatcctgaaattgtatcttttagattattttctaaagactaataccatttaatgtttaaatgttctttggaaatgatggtgagaatacgtgataatgggtcattggttttaatattttatttagccaagtggaaaattggcaacctggtgtcggtcctcccatttgtattttactggtgcatgaaatccaaaagtctagtaaccattgggacagacaactctactgcataagtttgtatgtttgtatatctgtatcacaaagcccagacactcgaactatataaacttgtcgcactaaagacagcaaatatgtctggtaattgcatattcttcatgtgtgcactggaatttcttattatataagaaaataaatgtgtttctaaaccaccatgaattgggtactgctgatagtactattcttcctggcacatggaaatatcccactgaggttgtcaatcaatattgatttaatcagtgtggcagcaaaggcactagaggaggaaaatactctagacaatcaagtatagatgggaaaattgcatcaccaagaaattcttaaaatcacaagtggataatttgcaatatcaattgattttactcaactgcttgagtcctttatcattccgttagaacactcctcatatttgcagataactcagcccctcacctcagcaacaagcaagaggacatcattataaacttcctcaatttctttcctatccagtgaaaaatatctaagtcccttttcccttcccttttccttcccttcccttcctttttctttccttccattctcttcctttttccttcctttttctttccttccattctcttcctttttccttcctttttcttactttacctccccctcctacctttccctttctcccttcctccctctctcccttccttcctctctccctctccttccttccttccttcaatccatacttttatatcttttcagagatcaatttttcccattcatttctacattctcagataccttgctccatgacttgttctacttctcttctatctttattctttccctcttgactgatcctttttgtctgcctttgcattttcaaaatcagtttttctaatcttaaaaaataactttgctcaaccctgatgcatctttattcactgtgtcattatctcattatttttaaaggttagtttctaaagccagggctctatactcactaccttcactcttggttaaaattaaaagaaatataggtcccagtgatatttatgggaaaatttgactgtgaataatcttgttgatataaacactttgggttttcaaaatgttatgctagctgttaactttcccagtaacattatgagggaagggctggaaaatacaaaaggtagacataggaaccgagaacaccacccctatggagccaagctatacatactctgtctctggttatcataaatacatctcctatattcaatgcttgcttagaaaggcatgatgtccacggagcaattcaattgttcactgtgatgggtttttttgttttctcctcatggaatgcaacttttatttatgagaatatggagaccagaaagtccctaaaataaatttgtaaaaaaaaaaatttaaggataaattcatcatgaaaaaagtattgttatagaaagtttaatttttcccctaagttgttatgaactgactacccctgtgttaattaaacttgccattatgcatgtgtatattttgttggaaaccattgagatacaagtcttatttttcttcttcaagctgtttgaaataaattgtgactcaaacaaattcaaataccagcccaatgctgaatcttattcttccagagcaccttctctctctccttcatggtctcaaacctggctcctacttttaccactctaaattagctaaatttgatctttattcaggcttcatcgtatctggcagatttttagaattcagtgatgatgatgatcatcacctcctccctctttaaattgcatcttactgtgtcttccataaaactagagtaccctaggcctcttagtgtatctttgattctttttcttttctttctttctttcttcttttttgtgttgttgttgttgttgagatgtagtctcactctgtcgccaggcagtggcacaacctcctctcactgcgacctccacctccctggttcaagcgattcccctgcctcagcctcctgagtagctgggactacaggttcacgccaccacacccagctaattttttgtattttttaatagaaacggggtttcaccattttggccaggatggtctcgatctcctgacctcgtgatccacccgccccgcctcccaaagtactgggattacaggcgttaagtcaccgcgcctggcctgtatctttgattctttgcctttactctctatcaatattttctctccttttagatttgtagtgcagcagcagcctttttgctgagttggtgctgcatctccacacgtctgttggacttttgtacttgcatattcagctatcaccttcaacttaatatgtccaaaactagtccctttatagtctatccctatcagccatcaacaaaactagccagaagtcaaccagctttccccatatctgttattgttcaagttatctttctaattcggcaaaagaaataagtacaattacaggatatattgaagaacaaatgagtaatgctatgtgaggatacagggaaaggttatataataggaaaacttttttttttttttctttgaaacagagtttccctctgtcacccaggctggagtgcagtggcgcaatctcgggtcactgcagcttccactccccgggttcaagcgattctcctgcctcagtctcccaagtagctgggattacaggcacccaccaccacacctggccaatttttgtgtttttggtggagacggggtttcaccatgttggccgggctggcctcgaactcctgacctcaagtaatccacccgccttggccccccaaagtgctgggattacaggcataagccaccacgccgagcctataatgggataacttctgatctgggttttgaagaataagcggggtagggcagccaggacagcaaaaatatcagaccaatggccaaaaccacaggctctagagtcagattgcctggatccaaatatcagctatactgatattacaaaagtttcttggcctctcattgcctcaatttcatcatctgtaaaaatggtaataataattcttatgaggactaaatgagttaacggaagtaaagctttcagatcaacagttccaggcatataattactacataagtctttgttttaatgatgacaattaaagacacatatgaaaatgagaaacacaaggacagttcagagcatttttaagagttcactgttgctaatgtgaaaaaggagcaatgacagtgactgagagacaagcaggactcagatgataaagggctttaaatgcagggtgggggccttggtgatgaagacccatttagaaattgtaaaagaagcaaaagtcggtgagagtagattttgacttcaagacaaaggaaacattcaatgtgaattttataattgttttgtctaattctaggaaaaatgacattggtaaaaaagcaataaatgttggtgaggtacagtgaaaaggaaaggcttatacactgttggtgggaaagtaaattagcacaatttatgtactatttatgtaccatttatgtttcctctttggaaaacagtatggagatttctcaaagaactaaaagagatctaacattctatctagcaatccccctactgggtatctacttaaaggaaaataagttattatatcaaaaagacacctgtatttgtaggtttatcacagcccagttcacaattgcaaagatatggaatctacataagtgtccatcaactgaagagtggataaagaaaatcaggggtgtccaaggtagacaatacagtcatgggttcttagtttctatttctgtttgggtcagtaaagccccttgctcatctcccttttctgcttatcactagggacagaaactaaaagtcatggcttcaggctgctaaagtctaaaacaaaacaaaacagaacaacaagaacaataaagttaggcgggacaagcttgaagactgaacagtagttatttatggcagaatactactcagccataaaaat

SEQ ID NO: 3 - DNA, 8612 bp, Homo sapiens
ttgctgatttgtattaggtaccatagagtgaggcgaggatgaagccgagaggatactgcagaggtctctggtgcatgtgtgtatgtgtgcgtttgtgtgtgtttgtgtgtctgtgtgttctgccccagtgagactgcagcccttgtaaatactttgacaccttttgcaagaaggaatctgaacaattgcaactgaaggcacattgttatcatctcgtctttgggtgatgctgttcctcactgcagatggataattttccttttaatcagaacagcataagaattatttctgagtggaggtgaggcttgtccaaatgtctttgctatcatggatttcctgactcctacctgtttgaggtttgggcaattatgaataaggctgctgtatacatccgtgtgcaggattttgtgtggacataagttttcaactcctttggttaaatcctaaggaatttcatatgcagaataaatggtaattaaaatgtgcaggatgacaagatggagcaaacagtgcttgtaccaccaggacctgacagcttcaacttcttcaccagagaatctcttgcggctattgaaagacgcattgcagaagaaaaggcaaagaatcccaaaccagacaaaaaagatgacgacgaaaatggcccaaagccaaatagtgacttggaagctggaaagaaccttccatttatttatggagacattcctccagagatggtgtcagagcccctggaggacctggacccctactatatcaataagaaaacttttatagtattgaataaagggaaggccatcttccggttcagtgccacctctgccctgtacattttaactcccttcaatcctcttaggaaaatagctattaagattttggtacattcattattcagcatgctaattatgtgcactattttgacaaactgtgtgtttatgacaatgagtaaccctcctgattggacaaagaatgtagaatacaccttcacaggaatatatacttttgaatcacttataaaaattattgcaaggggattctgtttagaagattttactttccttcgggatccatggaactggctcgatttcactgtcattacatttgcgtacgtcacagagtttgtggacctgggcaatgtctcggcattgagaacattcagagttctccgagcattgaagacgatttcagtcattccaggcctgaaaaccattgtgggagccctgatccagtctgtgaagaagctctcagatgtaatgatcctgactgtgttctgtctgagcgtatttgctctaattgggctgcagctgttcatgggcaacctgaggaataaatgtatacaatggcctcccaccaatgcttccttggaggaacatagtatagaaaagaatataactgtgaattataatggtacacttataaatgaaactgtctttgagtttgactggaagtcatatattcaagattcaagatatcattatttcctggagggttttttagatgcactactatgtggaaatagctctgatgcaggccaatgtccagagggatatatgtgtgtgaaagctggtagaaatcccaattatggctacacaagctttgataccttcagttgggcttttttgtccttgtttcgactaatgactcaggacttctgggaaaatctttatcaactgacattacgtgctgctgggaaaacgtacatgatattttttgtattggtcattttcttgggctcattctacctaataaatttgatcctggctgtggtggccatggcctacgaggaacagaatcaggccaccttggaagaagcagaacagaaagaggccgaatttcagcagatgattgaacagcttaaaaagcaacaggaggcagctcagcaggcagcaacggcaactgcctcagaacattccagagagcccagtgcagcaggcaggctctcagacagctcatctgaagcctctaagttgagttccaagagtgctaaggaaagaagaaatcggaggaagaaaagaaaacagaaagagcagtctggtggggaagagaaagatgaggatgaattccaaaaatctgaatctgaggacagcatcaggaggaaaggttttcgcttctccattgaagggaaccgattgacatatgaaaagaggtactcctccccacaccagtctttgttgagcatccgtggctccctattttcaccaaggcgaaatagcagaacaagccttttcagctttagagggcgagcaaaggatgtgggatctgagaacgacttcgcagatgatgagcacagcacctttgaggataacgagagccgtagagattccttgtttgtgccccgacgacacggagagagacgcaacagcaacctgagtcagaccagtaggtcatcccggatgctggcagtgtttccagcgaatgggaagatgcacagcactgtggattgcaatggtgtggtttccttggttggtggaccttcagttcctacatcgcctgttggacagcttctgccagaggtgataatagataagccagctactgatgacaatggaacaaccactgaaactgaaatgagaaagagaaggtcaagttctttccacgtttccatggactttctagaagatccttcccaaaggcaacgagcaatgagtatagccagcattctaacaaatacagtagaagaacttgaagaatccaggcagaaatgcccaccctgttggtataaattttccaacatattcttaatctgggactgttctccatattggttaaaagtgaaacatgttgtcaacctggttgtgatggacccatttgttgacctggccatcaccatctgtattgtcttaaatactcttttcatggccatggagcactatccaatgacggaccatttcaataatgtgcttacagtaggaaacttggttttcactgggatctttacagcagaaatgtttctgaaaattattgccatggatccttactattatttccaagaaggctggaatatctttgacggttttattgtgacgcttagcctggtagaacttggactcgccaatgtggaaggattatctgttctccgttcatttcgattgctgcgagttttcaagttggcaaaatcttggccaacgttaaatatgctaataaagatcatcggcaattccgtgggggctctgggaaatttaaccctcgtcttggccatcatcgtcttcatttttgccgtggtcggcatgcagctctttggtaaaagctacaaagattgtgtctgcaagatcgccagtgattgtcaactcccacgctggcacatgaatgacttcttccactccttcctgattgtgttccgcgtgctgtgtggggagtggatagagaccatgtgggactgtatggaggttgctggtcaagccatgtgccttactgtcttcatgatggtcatggtgattggaaacctagtggtcctgaatctctttctggccttgcttctgagctcatttagtgcagacaaccttgcagccactgatgatgataatgaaatgaataatctccaaattgctgtggataggatgcacaaaggagtagcttatgtgaaaagaaaaatatatgaatttattcaacagtccttcattaggaaacaaaagattttagatgaaattaaaccacttgatgatctaaacaacaagaaagacagttgtatgtccaatcatacagcagaaattgggaaagatcttgactatcttaaagatgtaaatggaactacaagtggtataggaactggcagcagtgttgaaaaatacattattgatgaaagtgattacatgtcattcataaacaaccccagtcttactgtgactgtaccaattgctgtaggagaatctgactttgaaaatttaaacacggaagactttagtagtgaatcggatctggaagaaagcaaagagaaactgaatgaaagcagtagctcatcagaaggtagcactgtggacatcggcgcacctgtagaagaacagcccgtagtggaacctgaagaaactcttgaaccagaagcttgtttcactgaaggctgtgtacaaagattcaagtgttgtcaaatcaatgtggaagaaggcagaggaaaacaatggtggaacctgagaaggacgtgtttccgaatagttgaacataactggtttgagaccttcattgttttcatgattctccttagtagtggtgctctggcatttgaagatatatatattgatcagcgaaagacgattaagacgatgttggaatatgctgacaaggttttcacttacattttcattctggaaatgcttctaaaatgggtggcatatggctatcaaacatatttcaccaatgcctggtgttggctggacttcttaattgttgatgtttcattggtcagtttaacagcaaatgccttgggttactcagaacttggagccatcaaatctctcaggacactaagagctctgagacctctaagagccttatctcgatttgaagggatgagggtggttgtgaatgcccttttaggagcaattccatccatcatgaatgtgcttctggtttgtcttatattctggctaattttcagcatcatgggcgtaaatttgtttgctggcaaattctaccactgtattaacaccacaactggtgacaggtttgacatcgaagacgtgaataatcatactgattgcctaaaactaatagaaagaaatgagactgctcgatggaaaaatgtgaaagtaaactttgataatgtaggatttgggtatctctctttgcttcaagttgccacattcaaaggatggatggatataatgtatgcagcagttgattccagaaatgtggaactccagcctaagtatgaagaaagtctgtacatgtatctttactttgttattttcatcatctttgggtccttcttcaccttgaacctgtttattggtgtcatcatagataatttcaaccagcagaaaaagaagtttggaggtcaagacatctttatgacagaagaacagaagaaatactataatgcaatgaaaaaattaggatcgaaaaaaccgcaaaagcctatacctcgaccaggaaacaaatttcaaggaatggtctttgacttcgtaaccagacaagtttttgacataagcatcatgattctcatctgtcttaacatggtcacaatgatggtggaaacagatgaccagagtgaatatgtgactaccattttgtcacgcatcaatctggtgttcattgtgctatttactggagagtgtgtactgaaactcatctctctacgccattattattttaccattggatggaatatttttgattttgtggttgtcattctctccattgtaggtatgtttcttgccgagctgatagaaaagtatttcgtgtcccctaccctgttccgagtgatccgtcttgctaggattggccgaatcctacgtctgatcaaaggagcaaaggggatccgcacgctgctctttgctttgatgatgtcccttcctgcgttgtttaacatcggcctcctactcttcctagtcatgttcatctacgccatctttgggatgtccaactttgcctatgttaagagggaagttgggatcgatgacatgttcaactttgagacctttggcaacagcatgatctgcctattccaaattacaacctctgctggctgggatggattgctagcacccattctcaacagtaagccacccgactgtgaccctaataaagttaaccctggaagctcagttaagggagactgtgggaacccatctgttggaattttcttttttgtcagttacatcatcatatccttcctggttgtggtgaacatgtacatcgcggtcatcctggagaacttcagtgttgctactgaagaaagtgcagagcctctgagtgaggatgactttgagatgttctatgaggtttgggagaagtttgatcccgatgcaactcagttcatggaatttgaaaaattatctcagtttgcagctgcgcttgaaccgcctctcaatctgccacaaccaaacaaactccagctcattgccatggatttgcccatggtgagtggtgaccggatccactgtcttgatatcttatttgcttttacaaagcgggttctaggagagagtggagagatggatgctctacgaatacagatggaagagcgattcatggcttccaatccttccaaggtctcctatcagccaatcactactactttaaaacgaaaacaagaggaagtatctgctgtcattattcagcgtgcttacagacgccaccttttaaagcgaactgtaaaacaagcttcctttacgtacaataaaaacaaaatcaaaggtggggctaatcttcttataaaagaagacatgataattgacagaataaatgaaaactctattacagaaaaaactgatctgaccatgtccactgcagcttgtccaccttcctatgaccgggtgacaaagccaattgtggaaaaacatgagcaagaaggcaaagatgaaaaagccaaagggaaataaatgaaaataaataaaaataattgggtgacaaattgtttacagcctgtgaaggtgatgtatttttatcaacaggactcctttaggaggtcaatgccaaactgactgtttttacacaaatctccttaaggtcagtgcctacaataagacagtgaccccttgtcagcaaactgtgactctgtgtaaaggggagatgaccttgacaggaggttactgttctcactaccagctgacactgctgaagataagatgcacaatggctagtcagactgtagggaccagtttcaaggggtgcaaacctgtgattttggggttgtttaacatgaaacactttagtgtagtaattgtatccactgtttgcatttcaactgccacatttgtcacatttttatggaatctgttagtggattcatctttttgttaatccatgtgtttattatatgtgactatttttgtaaacgaagtttctgttgagaaataggctaaggacctctataacaggtatgccacctggggggtatggcaaccacatggccctcccagctacacaaagtcgtggtttgcatgagggcatgctgcacttagagatcatgcatgagaaaaagtcacaagaaaaacaaattcttaaatttcaccatatttctgggaggggtaattgggtgataagtggaggtgctttgttgatcttgttttgcgaaatccagcccctagaccaagtagattatttgtgggtaggccagtaaatcttagcaggtgcaaacttcattcaaatgtttggagtcataaatgttatgtttctttttgttgtattaaaaaaaaaacctgaatagtgaatattgcccctcaccctccaccgccagaagactgaattgaccaaaattactctttataaatttctgctttttcctgcactttgtttagccatcttcggctctcagcaaggttgacactgtatatgttaatgaaatgctatttattatgtaaatagtcattttaccctgtggtgcacgtttgagcaaacaaataatgacctaagcacagtatttattgcatcaaatatgtaccacaagaaatgtagagtgcaagctttacacaggtaataaaatgtattctgtaccatttatagatagtttggatgctatcaatgcatgtttatattaccatgctgctgtatctggtttctctcactgctcagaatctcatttatgagaaaccatatgtcagtggtaaagtcaaggaaattgttcaacagatctcatttatttaagtcattaagcaatagtttgcagcactttaacagctttttggttatttttacattttaagtggataacatatggtatatagccagactgtacagacatgtttaaaaaaacacactgcttaacctattaaatatgtgtttagaattttataagcaaatataaatactgtaaaaagtcactttattttatttttcagcattatgtacataaatatgaagaggaaattatcttcaggttgatatcacaatcacttttcttactttctgtccatagtactttttcatgaaagaaatttgctaaataagacatgaaaacaagactgggtagttgtagatttctgctttttaaattacatttgctaattttagattatttcacaattttaaggagcaaaataggttcacgattcatatccaaattatgctttgcaattggaaaagggtttaaaattttatttatatttctggtagtacctgcactaactgaattgaaggtagtgcttatgttatttttgttctttttttctgacttcggtttatgttttcatttctttggagtaatgctgctctagattgttctaaatagaatgtgggcttcataatttttttttccacaaaaacagagtagtcaacttatatagtcaattacatcaggacattttgtgtttcttacagaagcaaaccataggctcctcttttccttaaaactacttagataaactgtattcgtgaactgcatgctggaaaatgctactattatgctaaataatgctaaccaacatttaaaatgtgcaaaactaataaagattacattttttatttta

SEQ ID NO: 4-10 - skipped (7 entries)

SEQ ID NO: 11 - DNA, 24 bp, Artificial sequence
  Primer
gctgatgctttgggaagtatgtta

SEQ ID NO: 12 - DNA, 25 bp, Artificial sequence
  Primer
caccttccttctttttgattttgtc

SEQ ID NO: 13 - DNA, 21 bp, Artificial sequence
  Probe
tacatgagtggctatcatact

SEQ ID NO: 14 - DNA, 27 bp, Artificial sequence
  Primer
catggtacatgagtggctatcatactg

SEQ ID NO: 15 - DNA, 25 bp, Artificial sequence
  Primer
tggtgtcatttagtgctgctctatg

SEQ ID NO: 16 - DNA, 21 bp, Artificial sequence
  Probe
ccagcatttccatataatagc

SEQ ID NO: 17 - DNA, 20 bp, Artificial sequence
  Primer
caggaggattccgtgctgtt

SEQ ID NO: 18 - DNA, 24 bp, Artificial sequence
  Primer
cagtgctgtatcatcccaaatgtc

SEQ ID NO: 19 - DNA, 15 bp, Artificial sequence
  Probe
acaggccagagcgat

SEQ ID NO: 20 - DNA, 21 bp, Artificial sequence
  Primer
agccctttattatgggtggtt

SEQ ID NO: 21 - DNA, 24 bp, Artificial sequence
  Primer
ccagaatataaggcaaaccagaag

SEQ ID NO: 22 - DNA, 25 bp, Artificial sequence
  Probe
tggatggaattgctcctaacagggc

SEQ ID NO: 23 - DNA, 23 bp, Artificial sequence
  Primer
ccctaagagccttatcacgattt

SEQ ID NO: 24 - DNA, 20 bp, Artificial sequence
  Primer
ggcaaaccagaagcacattc

SEQ ID NO: 25 - DNA, 24 bp, Artificial sequence
  Probe
agggtggttgtgaatgccctgtta

SEQ ID NO: 26 - DNA, 18 bp, Artificial sequence
  Primer
gctcaagctcatctcgct

SEQ ID NO: 27 - DNA, 19 bp, Artificial sequence
  Primer
agctccgcaagaaacatcc

SEQ ID NO: 28 - DNA, 27 bp, Artificial sequence
  Probe
ttcgattttgtggtggtcatcctctcc

SEQ ID NO: 29 - DNA, 20 bp, Artificial sequence
  Primer
ggcaaattcaacggcacagt

SEQ ID NO: 30 - DNA, 20 bp, Artificial sequence
  Primer
gggtctcgctcctggaagat

SEQ ID NO: 31 - DNA, 27 bp, Artificial sequence
  Probe
aaggccgagaatgggaagcttgtcatc

SEQ ID NO: 32 - DNA, 19 bp, Artificial sequence
  Synthetic oligonucleotide
actttcataatgctggcag

SEQ ID NO: 33 - DNA, 20 bp, Artificial sequence
  Synthetic oligonucleotide
cactttcataatgctggcag

SEQ ID NO: 34 - DNA, 19 bp, Artificial sequence
  Synthetic oligonucleotide
cactttcataatgctggca

SEQ ID NO: 35 - DNA, 20 bp, Artificial sequence
  Synthetic oligonucleotide
tcactttcataatgctggca

SEQ ID NO: 36 - DNA, 16 bp, Artificial sequence
  Synthetic oligonucleotide
ctttcataatgctggc

SEQ ID NO: 37 - DNA, 17 bp, Artificial sequence
  Synthetic oligonucleotide
actttcataatgctggc

SEQ ID NO: 38 - DNA, 18 bp, Artificial sequence
  Synthetic oligonucleotide
cactttcataatgctggc

SEQ ID NO: 39 - DNA, 19 bp, Artificial sequence
  Synthetic oligonucleotide
tcactttcataatgctggc

SEQ ID NO: 40 - DNA, 16 bp, Artificial sequence
  Synthetic oligonucleotide
actttcataatgctgg

SEQ ID NO: 41 - DNA, 17 bp, Artificial sequence
  Synthetic oligonucleotide
cactttcataatgctgg

SEQ ID NO: 42 - DNA, 18 bp, Artificial sequence
  Synthetic oligonucleotide
tcactttcataatgctgg

SEQ ID NO: 43 - DNA, 19 bp, Artificial sequence
  Synthetic oligonucleotide
ttcactttcataatgctgg

SEQ ID NO: 44 - skipped

SEQ ID NO: 45 - DNA, 20 bp, Artificial sequence
  Synthetic oligonucleotide
attcactttcataatgctgg

SEQ ID NO: 46 - DNA, 19 bp, Artificial sequence
  Synthetic oligonucleotide
attcactttcataatgctg

SEQ ID NO: 47 - DNA, 20 bp, Artificial sequence
  Synthetic oligonucleotide
agattcactttcataatgct

SEQ ID NO: 48 - DNA, 20 bp, Artificial sequence
  Synthetic oligonucleotide
gattcactttcataatgctg

SEQ ID NO: 49 - DNA, 19 bp, Artificial sequence
  Synthetic oligonucleotide
gattcactttcataatgct

SEQ ID NO: 50 - DNA, 19 bp, Artificial sequence
  Synthetic oligonucleotide
tcactttcataatgctggt

SEQ ID NO: 51 - DNA, 19 bp, Artificial sequence
  Synthetic oligonucleotide
tcactttcataatgctgga

SEQ ID NO: 52 - DNA, 20 bp, Artificial sequence
  Synthetic oligonucleotide
ttcactttcataatgctggc

SEQ ID NO: 53 - DNA, 19 bp, Artificial sequence
  Synthetic oligonucleotide
tcactttcataatgctggu

SEQ ID NO: 54 - DNA, 20 bp, Artificial sequence
  Synthetic oligonucleotide
tcactttcataatgctggaa

SEQ ID NO: 55 - DNA, 20 bp, Artificial sequence
  Synthetic oligonucleotide
tcactttcataatgctggat

SEQ ID NO: 56 - DNA, 20 bp, Artificial sequence
  Synthetic oligonucleotide
tcactttcataatgctggac

SEQ ID NO: 57 - DNA, 20 bp, Artificial sequence
  Synthetic oligonucleotide
tcactttcataatgctggtc

SEQ ID NO: 58 - DNA, 20 bp, Artificial sequence
  Synthetic oligonucleotide
tcactttcataatgctggtt

SEQ ID NO: 59 - DNA, 20 bp, Artificial sequence
  Synthetic oligonucleotide
tcactttcataatgctggta

SEQ ID NO: 60 - DNA, 20 bp, Artificial sequence
  Synthetic oligonucleotide
tcactttcataatgctggcc

SEQ ID NO: 61 - DNA, 20 bp, Artificial sequence
  Synthetic oligonucleotide
tcactttcataatgctggct

SEQ ID NO: 62 - DNA, 19 bp, Artificial sequence
  Synthetic oligonucleotide
ctcactttcataatgctgg

SEQ ID NO: 63 - DNA, 19 bp, Artificial sequence
  Synthetic oligonucleotide
atcactttcataatgctgg

SEQ ID NO: 64 - DNA, 18 bp, Artificial sequence
  Synthetic oligonucleotide
agttggagcaagattatc

SEQ ID NO: 65 - DNA, 20 bp, Artificial sequence
  Synthetic oligonucleotide
aagttggagcaagattatcc

SEQ ID NO: 66 - DNA, 19 bp, Artificial sequence
  Synthetic oligonucleotide
agttggagcaagattatcc

SEQ ID NO: 67 - DNA, 19 bp, Artificial sequence
  Synthetic oligonucleotide
aagttggagcaagattatc

SEQ ID NO: 68 - DNA, 3120 bp, Homo sapiens
cagcagcgcactcggtgccccgcgcagggtcgcgatgctgcccggtttggcactgctcctgctggccgcctggacggctcgggcgctggaggtacccactgatggtaatgctggcctgctggctgaaccccagattgccatgttctgtggcagactgaacatgcacatgaatgtccagaatgggaagtgggattcagatccatcagggaccaaaacctgcattgataccaaggaaggcatcctgcagtattgccaagaagtctaccctgaactgcagatcaccaatgtggtagaagccaaccaaccagtgaccatccagaactggtgcaagcggggccgcaagcagtgcaagacccatccccactttgtgattccctaccgctgcttagttggtgagtttgtaagtgatgcccttctcgttcctgacaagtgcaaattcttacaccaggagaggatggatgtttgcgaaactcatcttcactggcacaccgtcgccaaagagacatgcagtgagaagagtaccaacttgcatgactacggcatgttgctgccctgcggaattgacaagttccgaggggtagagtttgtgtgttgcccactggctgaagaaagtgacaatgtggattctgctgatgcggaggaggatgactcggatgtctggtggggcggagcagacacagactatgcagatgggagtgaagacaaagtagtagaagtagcagaggaggaagaagtggctgaggtggaagaagaagaagccgatgatgacgaggacgatgaggatggtgatgaggtagaggaagaggctgaggaaccctacgaagaagccacagagagaaccaccagcattgccaccaccaccaccaccaccacagagtctgtggaagaggtggttcgagaggtgtgctctgaacaagccgagacggggccgtgccgagcaatgatctcccgctggtactttgatgtgactgaagggaagtgtgccccattcttttacggcggatgtggcggcaaccggaacaactttgacacagaagagtactgcatggccgtgtgtggcagcgccatgtcccaaagtttactcaagactacccaggaacctcttgcccgagatcctgttaaacttcctacaacagcagccagtacccctgatgccgttgacaagtatctcgagacacctggggatgagaatgaacatgcccatttccagaaagccaaagagaggcttgaggccaagcaccgagagagaatgtcccaggtcatgagagaatgggaagaggcagaacgtcaagcaaagaacttgcctaaagctgataagaaggcagttatccagcatttccaggagaaagtggaatctttggaacaggaagcagccaacgagagacagcagctggtggagacacacatggccagagtggaagccatgctcaatgaccgccgccgcctggccctggagaactacatcaccgctctgcaggctgttcctcctcggcctcgtcacgtgttcaatatgctaaagaagtatgtccgcgcagaacagaaggacagacagcacaccctaaagcatttcgagcatgtgcgcatggtggatcccaagaaagccgctcagatccggtcccaggttatgacacacctccgtgtgatttatgagcgcatgaatcagtctctctccctgctctacaacgtgcctgcagtggccgaggagattcaggatgaagttgatgagctgcttcagaaagagcaaaactattcagatgacgtcttggccaacatgattagtgaaccaaggatcagttacggaaacgatgctctcatgccatctttgaccgaaacgaaaaccaccgtggagctccttcccgtgaatggagagttcagcctggacgatctccagccgtggcattcttttggggctgactctgtgccagccaacacagaaaacgaagttgagcctgttgatgcccgccctgctgccgaccgaggactgaccactcgaccaggttctgggttgacaaatatcaagacggaggagatctctgaagtgaagatggatgcagaattccgacatgactcaggatatgaagttcatcatcaaaaattggtgttctttgcagaagatgtgggttcaaacaaaggtgcaatcattggactcatggtgggcggtgttgtcatagcgacagtgatcgtcatcaccttggtgatgctgaagaagaaacagtacacatccattcatcatggtgtggtggaggttgacgccgctgtcaccccagaggagcgccacctgtccaagatgcagcagaacggctacgaaaatccaacctacaagttctttgagcagatgcagaactagacccccgccacagcagcctctgaagttggacagcaaaaccattgcttcactacccatcggtgtccatttatagaataatgtgggaagaaacaaacccgttttatgatttactcattatcgccttttgacagctgtgctgtaacacaagtagatgcctgaacttgaattaatccacacatcagtaatgtattctatctctctttacattttggtctctatactacattattaatgggttttgtgtactgtaaagaatttagctgtatcaaactagtgcatgaatagattctctcctgattatttatcacatagccccttagccagttgtatattattcttgtggtttgtgacccaattaagtcctactttacatatgctttaagaatcgatgggggatgcttcatgtgaacgtgggagttcagctgcttctcttgcctaagtattcctttcctgatcactatgcattttaaagttaaacatttttaagtatttcagatgctttagagagattttttttccatgactgcattttactgtacagattgctgcttctgctatatttgtgatataggaattaagaggatacacacgtttgtttcttcgtgcctgttttatgtgcacacattaggcattgagacttcaagcttttctttttttgtccacgtatctttgggtctttgataaagaaaagaatccctgttcattgtaagcacttttacggggcgggtggggaggggtgctctgctggtcttcaattaccaagaattctccaa

SEQ ID NO: 69 - DNA, 296000 bp, Homo sapiens
gtactgtaaaaagacacagacaagccagaacacatttagagaatggccaaggtgtggaaggaaccagaaaccatgccattatgcaactgttgaaggaagtgcctgttttaccttgtgaagagaagactctagaggaagaagtagcatgaaaaccgctggcaaatttgtaaagatctgaagtgtggaaaagaattattctgcttggtcactggggatacaaggatatctgagtgggagtttaaaggcgggggatgtgagctttaaatgggataagaacattctagtaaccagaaatgcccaaagatagaatgcacagtctggagagccagtgaatatctcacaaatggagacacttgaaactaggatggggatgctgttgtaggaattccagcagacaagtggttgttggttccttccccaactttgtagggttataactagggatgttcctgcgttttctgcttggaggatctgcaagacacctcagggcaggaaatggcattaaatgcagaacagagctagtggctgaaaagcaaaaagccatcaggatctctgagtagtgaaggaaccagagaacatgcaggcaatgtccatcattctgacgcaatcagcagcataatcatcttcccccaggaacatcttgaccagggaatgtgtcagtgtggtgaatttcaacagtggaaagagaaactgctaaatctaagaactttaatttttatagattatgatctcatctctacaattttgaatttcatgctcaataaaagttccttactctctttttttttttttgagacggagtctcgctctgtcgcccaggctggagtgcagtggcgcgatctcggctcacttcaagctcagcctcccgggttcacgccattctcctgcctcagcctccccagtagctgggactacaggcgcccgccacgacgcccggctaattttttgtatttttagtagagacggggtttcaccgtgttagccaggatggtgttgatctcctgacctcgtgatccgcccgcctcagcctcccaaagaaaagtccctcactcttaaagttgcctcctccttcccagggctggcttcatgggcatgcaaccctggagagtctcacaggccctgcggtgggaggagccccatgcttggtttaacgctctgccattgccatcttaaaattcttaatttaattttttttcttttttttgaggtggagtctcgctctgtcgcccaggctggagtgcaatggcacaatcttggctcactgcaacctccgcctcccaggttcaagcgattctcctgcctcagcctctggagtagctgggattacaggcaggagtaaccacgctcggctaatttttgcatttttagtagagatgggggtttcaccatgttggccaggctggtctagaactcctgacctcaggtgatctgcccacctgggcctcctaaagtgctgggattacaggcatgagccaccaggcccggccttaaaattcttaataatgtaacaaagggtctcacgtttgcattttgcagtggactctgcaagatttgtagctttggaccacgtttctctttgcattcagataccttcttttttgccttatttgctcatgcagacccggaacaaatacggaattgcggtgggtaaatgtggtgcagaaagtgaacaactgggtttgtcctgtcactttaggcttttccctgctgtcccagcttcatgtcacttacttgctattagatttgggagttcattagcttcattttcctgatgtataaataggaataatagtaacagcctctttggcttttgtaggaagtaaatgacatgaagcgtataaacaaatactgcatgacaataaatatttgtccttatttgttgaggacatccaaaggacattcaggggcaaaagtaatccaagagtcaagactgaatgcctagtgcgggaaaagacacacaagacaacatttaggggagctggtacagaaatgacttcccaggaaggaagtctgtaccccgctggctgagccatccttcccgggcctaggcacccttgtcagcgcaatgagcaagggagagaaggcaggctgcagtgcagccctcagaagggccagagcactccctggcttcagtccttcgctccaagccctgtgtggagtgggctgtggcttggtaactaaatgctacttcaggtcaagagcaggggatatatctgggcagttctagagcattctaaactatctggacactaactggacagtggacggtttgtgtttaatccaggagaaagtggcatggcagaaggttcatttctataattcaggacagacacaatgaagaacaagggcagcgtttgaggtcagaagtcctcatttacgggggtcgaatacgaatgatctctcctaatttttccttcttccccaactcagatggatgttacatccctgcttaacaacaaaaaaagaccccccgccccgcaaaatccacactgaccaccccctttaacaaaacaaaaccaaaaacaaacaaaaatataagaaagaaacaaaacccaagcccagaaccctgctttcaagaagaagtaaatgggttggccgcttctttgccaggtcctgcgccttgctcctttggttcgttctaaagatagaaattccaggttgctcgtgcctgcttttgacgttgggggttaaaaaatgaggttttgctgtctcaacaagcaaagaaaatcctatttcctttaagcttcactcgttctcattctcttccagaaacgcctgccccacctctccaaaccgagagaaaaaacgaaatgcggataaaaacgcaccctagcagcagtcctttatacgacacccccgggaggcctgcggggtcggatgattcaagctcacggggacgagcaggagcgctctcgacttttctagagcctcagcgtcctaggactcacctttccctgatcctgcaccgtccctctcctggccccagactctccctcccactgttcacgaagcccaggtgggccgtcggccggggagcggagggggcgcgtggggtgcaggcggcgccaagggcgcgtgcacctgtgggcgcggggcgcgagggcccctcccggcgcgagcgggcgcagttccccggcggcgccgctaggggtctctctcgggtgccgagcggggtgggccggatcagctgactcgcctggctctgagccccgccgccgcgctcgggctccgtcagtttcctcggcagcggtaggcgagagcacgcggaggagcgtgcgcgggggccccgggagacggcggcggtggcggcgcgggcagagcaaggacgcggcggatcccactcgcacagcagcgcactcggtgccccgcgcagggtcgcgatgctgcccggtttggcactgctcctgctggccgcctggacggctcgggcgctggaggtgggtgccgcgcctcggaaggcggggggaggctgcacggtggggacgcgataccccccaagaccttaacccaagtctttaatgcagagaagccgggggtccgtcaatgggacccctctcctctccgcccccgcttgcggacgtccagcgcatccccgctttcggcccagccctgccccagggagtcgcgctccggcccgctgagagggagcgggcgaggcgctggtctccctggttccgcgccagcccggggcgagaagggtagggggcgaccctgagcccagaccccgacttagtccctgccttggaagcgggggtcgggggaggcgagagacattcagacaggggggaagggggaaggagcacgtggggaaaaccgaaaacgcagcgtccctaaagccagtccttcgctcttgaatcgttgccctttcctttctcttgggccctggggaggaggaggaggagtcgggacagcccaggaagctaggagcccctcgcttttccctgcgttctccgcctcgtttcaccttcctctctcacccccatcccccttccttgctccaacctcttttcgcggctgctggcggcggcagcctgggtgcgaccctagcccgagccggcgtcggggtcgcgcaccgccttccacaggcaaactttgtgcatgtccgcgtctcccttttgtgtaacttgcgagaaatgggaggggtcggagacccatagccaccccgcgccttccccaagtctggacgtcccgggagttcgctcgcaccctaagctctgtctgagaggcagaaggtccgcgggaacaaaagccgcgacaccccgccctcgccgtgggccgagccgcgttagtctcagtgcgccaccgaggctcccgcccggctcccttcccggggctgcgcgtccgcctgggagggggcagagacgctgccggggcttctggcggagcctcggggcccctctgcttcccaccctcggatcacctccgaggcttaattctgtgctgggctgtaaagtccttggcggggaggaaataaggcggagagtgggatgtgcgtctggaaagggcagtggcggatggtggggaggcacgggctctgtcctgtgcatccaaggaggcgtttgtctgattaaggcgcggcctcttccctggcagctctggggactctggtttagttcccctgggggcacaggatgctggggagggtccgaagggtcttttttttagggtgcagataaaaggatcgaattgagtgaagattaagacggagaagatggcgcctctgcagtgcagcaaagaaaagctgtgtggaggctgcagcctagtgaaatccacccaccactaggtgtataacaagtcttccccattcatccaactctcgaacattcagctaacgcctgtgcacaatgactgtttttctttacatctgaagatgcttagaagttgtttgcatgacagttgggccagaggaggctgtatttcacttcggacttcggttgggttcctgtttggcatcttaacatttgcaaccttccttacccgtttttcccctcttttcccccagcctcctagtaattttccaaaagaaaaaaagcaatttccgggcagatgttttcctgtaattccactgaggctgtacagactatcacaccattagttttttagtttctaatttgcaaggtcattgaacttttttctcttctgatttttacccacaagtggctcaggaatcaccttagggctagttaagacaggttgttttaagagttaaagaatttcgttttccatgttttaaaaaaatgcacttaactaagagaattctgatttctctcatgacttacttacatttatttgtagaattattccagttttcccgaatggtcttactacagattaaaaaccatacatttaaggaattaaaagcatatgataaccgtatttttgaagcttttgtcaaaacttaaatatgtaactttgttgagcaatatttctttctgtataaaaagaggaagcatgtaggcagattcgaatttagtttttggtctgtttaattgcattaatatgctctttctgccatcttttgggaccttttcagtagctattgttaactcctttaaagggtggaggtgagattcacattatgccattttgcgaagtgttggtagaagggtaggtaattcagtctactgaggtttgagggtggtttatctggttctctctgtgtccactgaaaagatgtaattacgagttgactgtcttttatagagcttagaaaataggtctgctgcaggtggctgtagaaaagaaatgaataagggcaatgataatggggccttggctatcgggggaaacatggttattatctgggttgatgattttggctggtatgttgatagaggtgtgagtttaacaaaccctaatctatatgatgtttcactaccctaatatttatttatttatttatttttaaatctagcttcctcttaagttttatttccctctgttgagggtttaacctagtcacaatcatcttacctttgtggtagtgctaatttatagtttatggaaacctgctgctactgactagtacctcgctaaaggtagaagccgacacacagaatagtaaagctcaggtttgatggtgatctgtaaggagtcacggttcttgctaatcgatgagaaaccatgataactggcagactgcagaagcttttctcttgtcaccggaaccagcagaggctcctgaacgacatttgcaaggctattagtactgcggagaagttactagatggaataatactggtcctgactgaggaaatgaaaaggaacatgcaagttcacgaggttaaatgaggaatggctgattcaaaaaaattaaaaagaaataacgtgatcaacaatattggtttgaaggaatgggagaggttgtctttatgttaagtcttgttgctagaggatctctattttatgttactgttttttgcatactagagtcttctacagatatttgtatgaatgttgtcagtcattctggaaataagcatagctattacttgcatttcacgtggccactaaactatcagtgagaagtgcattaaattcagtagaaatgtacattgtttctgcaaattgtattaccttgagaatcttacaaagcatctttcattaatacatttcttttaaaatctctatcaattacaaatgtaaagataaacctgtacagatgcattttaaatttaaagcttccagaatgtaaggtttagttcgactgcatacctcattacctccccttccctcctccctccccttactcccaggaagtttgcagggtaaataaaacatgcacatgataataaaacaaagtggaatgtactaaaataccaaaaggaaaatacagattaggtatactgagtaaatatgttacagagaaaacttcctgtatttaaaaagtaaggaacaatgggatgagatcatagataatcctggagcatttcctggtagtaaatttccagccaggtttatatcccaggtctggggattggaggttaagtttctgcatatacaatatttgtttacattcctctctgcctctaccagacagacagacagacacacacacacacacacacacacaccctctgtctctttctctctctttctctctctctctctctctctctctctctctctcacttgagtgacagatgctggtgcagggtattctcaacaggagtagggaatttgaaataaggagttgagaggtcaaaggtaaggggctgaatgcaggaccagagagcttcagtagcatcttgatgggcagagtatgagatgaacagtggcaacgaggaggatagggaaaaatcacattttctgtttgtgttttgtttttgtctggtggttttcaacctctctctgtttcacttgactatgcttgattatgaaatcttttttttttctttttttaatttaaagatctcaactggctttgttgtgattctacattcaggcaacactattctgtaaaatagtataaatgttccgatgagttgaacagaggagattggctttgtagacagaaaagggctgaagaaaacagaaataaaaaaatcttttccttttcatagtgagagctcagatgcaaatgtatggagtggggatggatgggaaatgccgtcttttgcaaacccttggaaacgctgtcaccctgtgggtctcacagccagtgtacagataacaccctcatctgtacacagaagacagaaggtggcaggggaaggaatgagcacaccccagaatgagtagcaagtttaatcaataaaatatgtatttctttttttattgttgtataagaagaaaagcagacagaactcaaaccctgaagctgattttgcaagtgaaaagcttagtaaagggggaaatgttatgtaactattttttcagtttagtgtggatggcttaagaaataatcattactgtgaggacactagtatttttcttggaaaaaaaagtttggcaaattttcctctttagattaatcttggttatagattattattatgcttgagtggtacctcttcagaagtagaaatctggcaaaaactggagtacaatgattgctctaggaataaattcacatatttaaatttaaaagcctggatatgtgcatcaattaatagctttatgaaacagggatgcttagtagattagctagctgagtattcagagagggccacagaagtctcaggttcacatgtattaaatctgctgaaatagaaacctaagagatcattttatttaggtttattttgtgtggctacatgttgaagaaacatgcaatagagatttagcttgaaccttgcgagactcacagtatcttacgaaagaagatagttaaaatggggaagatgagaggtttttaaaaatgtcacctctgtagaacgaaccagagttgttctcaatttataatgttgaatttgatgccaggcgtgatgttaggccaataacactgagtcattgagtgtttctcaggtatgtagagaaggcagcattgcacactaatcaggagagtttagaccagggcaggaatgcatgggcataaattctgtctttgtttcttttgagctagtgaccatgggcaagtttctgtgcctcagttttttcctttgtaaaatgggatgagtacttctagttattgaggatcgaattaatatctttgttaaatgcttgaaacagtgtgtgagttaatatatatgtaacctgatggcatagcataagcactgtgtgttagttgctgctatgtatggtgatgatgttgatgtacaatgggtatatgtaagtttcctgcatagttgaaagttaaaaatctagatgatgtttcacttattgacaaattacttattggccaattaagactattgcaggaaattgacagattgttgtctatgagtttgatctaaatttaaaaagcacatggtatctcagatacaatttttagaatacatgttataaaatttcatttattaaatatgtattgtgtatttcaattggttttttgaaaaatgaaaataattcatgctcattgaaaaatttaaaacagtacagaaatgtgcaaaaagcataagcattttttacacaaatgggaaatacctagtttttttttttctttttttccacataacatggatgtagaccttttttttttttttttgagacagaatctccctctgtcacccaggctggagtgcagtggcgcgatctcggctcactgcaacctccgcctcctgggttcaagcgattctcctgcctcagcctcctgagtagctgggactatgggcactcgccaccatgcccagctaatttttgtattttttaagtagagatggggtttcaccatgttggccaggctggtctcaaactcctgacctcaagtgatctgcccacctcggcctcccagagacctattttttaatgttgtacacactggcagcttgccacagatgtctaatattgagcaagtttatacactggcttgattattaactattagttggctatcagctatgtgcaaggaactgtgaacagacttggtttagttttcagtagaatctttgctagcaaaacgaataaacaggctttgccaatctgggtagaaatggaagatttcaaatgccagcaaaagaattttggtcctaatatggaagcttgaagttatgttcacccaaggacagggaaaccaaaaagcagattgcttgagaatgcggcatttctctaggaaatcagtttcaaaataaaatgaattttttgttttgttttgtttttgagacggagtctcgccctgtcgcccaagctggaatgcagtggtgcgatctcagctcactgcaatctccgcctctcaggttcaagcgattctcctgcctcagcctcccgagtagctgggattacaggcgtgtgccactatgcccagctaatttttatatttttagtagagacggggtttcactatgttggtcaggctggtctcaaactcttgacctcgtgatccgcctgcctcggcctcccaaagtgctgcgattacaggcgtgagccaccgcgcccagctgcagtaaagtgaatttgtgtaaccagccatgttatggctgttacatctttaaaactttatagtgatctgctgtttaattgaaattatatattttttttaaaaatcagcatatgttgctcaaaaataaaaggtttttagcttcaaaagcaggccaaggatatttgaaagccttgagtgtatgaaactggtgatactgtggttaaatgatgatgaacgcagggaaaaatcaagaagcagagtcccaaagaattcacatgggtttttgttaaccagctcatgtaattataattgtcctgtccaactaaagacaagaagacaagaagtgggttcacatacgaggatgtgtaatgacagaagccatatttgtgataaacatcctgattacagtagatacagtgaggagtgattaagatggttccagaagcaggagtggagggttcatgagcagggatgaggaataaataggacaaacattttggaaaagggaaaagatgaataagcctgttttgtaaattaatggatcctgatgaatgaagtgcagtgattccttaaggtcttattaatgatggaccccaaacagtgtttgaatctcttaatttccagatggttcctttttttcttcacaaagtcagaaggttttcttatgagaaatttgattcaacaagaataattgtcacttcttttgttttttggtgatttttttttttttttttttttttttttttgagactgagttttactgtgtcacccaggctggagtgcagtggcgtgtcttggcttactgcaacctctgcctcccgggttcaagcaattctcatgcctcagcctcctgaatagctgggtttacaggcatgtgccaccacgcctggctaatttttgtttttgttttttttttttttagtagagacagggtttcactacattggccagggtggtctcgaactcctgacttcaagtgatccacccacctaggcctcccaaagtgctgggataacaggtgtgagccactgcacctggccaattttttggtgattttgataggaatttttttttttgcctgatgctttttttgagagaatctaataatttgtctcttatttaataatttggctttcattagcttccagaaagccacatactgtcttcattgaaaaatgtaaggcatcctagatgatacagactgataaattacttttcagccataaaagatacttatgagaataagagatctgttgcataaagaaaagtcatttgtgttaagtgaagaaatgcattattactcttgctgctttgctaaatttcaaacattgaataactaatatattttgaccccctggagatattttacaggaagaaaaatgagaggtttaatcctactgttgagatagacttaacgtgttttagacctgcccctcatcccaagttactacaaactcatttgtttagtttttccttgtctgtgtgctcgttatttcacagtaaaattagtgaggcaacataaattttatttttaagagaaagtaaagaaaatggctttatccattaaaggtttattcatcttaaaaaaggacttgttatatctactcctactattggatgaattttcaaaagcatattgatactgtgtttggttttgtttgttttcgggacaagtcctcactctgtcacccaggctgaagtgcagtggtgtgatctgtagccgtggcctcctgggctgaagccatcttcctgccccagcctccagagtagctgggactacaggcatgtgccaccacatctgactaatttcttaaatgttttgtagagatggggtccccactatgttgcccaggctgatcttgaactcctgggctcaagcgatcctcctgcctcgaccttccaaagtgctagattacaggtgtgagctattgtgcctggccaatgttgtttttataaatatcattactcagttattttgtttataattgaattgataggctcatagaataaagatggataagcactgtttcttaactgtatttattgatttttttatctttcaaaaaaaaaatcctcatctacttcaaagattaagcctttaaaaccgatgcaaagtttttgaagtcttagcttaagtcttcagagactaacattaaaacccatcatatgaaaagtgatatgtagtagcaaatattctccatcctgatgctctcaattgcttattatggtttaacacaaatataattttgtcattacagtaaattagtttgaggatataactgaagagtacctaagaaactcccatagaaatgtgaaaatatgcagactaattattctaagaataattaatcatagatacttacatattaaattgattagcaatttaaaattaaagccaaatttctgtggaaattagcttattttcatacacaaagaaacctagattcttaggggtacaaccaagaaagggccactccttcatttcacaaatattttcgaggtccttgcccccaagagggtagacagaataaaaaggaggaaggaagtgacttggaaaaaattaagttgggtaaggaatataagagaatgctacgtagaaggatgtgtgttgtgaatgcaatagtttctgtagtattgtcaaagttctctgatcatttcagtatgtgaaggtaaacttagataactgggggaaggaactatatatttactacattgtaaaagaataattgtagacagaagatctactttgggtgattaaatgttgaaaacaagtggtgggagagagaagttagtgttgattgtgatcacacacttttctatacagtaatttgtttgatcactcatgataatgccttacattttgtatgtactaaataaatgagttctctagaaattctatgttgtggtgataaagaattacgttcagattgaagattcgaacagctgtgcaaccttctcaacatttaagaaactgcgaacaagcatagaaagaagattaaagccttttaaataagattcttttttttcagcctctttttggaacattttattgtgaaaaggtttcataaatactgtcaatacatcacgttcagtcatttgcaattgtatttcaaaaattcagttggcctgcaaaaagaaaaaatgcctcatttttgaaatatttcatccatgccctgattgattgggacactttcaatagagggtgcctagacataattttgtgtgaagaagttagtagagtttggaaagaaaatgtgtattggaattaaatttagtggcatgaaaatgaaaatttctctgtcattgtctttttttttggctccttttttggccattttacagctagtgtttagtgtgacaaggatcaaaattggccctttaaaaaaatatattgaattctattacctctgttatctaaaagaattgtatttttcaatttgaagagcttgaagccaatactactatataccattaacttgacaggaattgaaaatctaattgaggtcattatgattagccttgtatcttgctagtattttctcaatcttattttgaatgttttgtgtcaagtgttaaatcctcttataccacagaatccagaaaatttaaatgcaacagaagtaaaacgaatataaaaattctatggttgttgtggaggggcgttcttggctaacccatagggtgtttgaatgtaaaggcagcttacagaactgctgctagttgaattgtggagggtttcacttttaagagtacatttgagacaaaattgcaattttggaatcacttattcctgcttgttcagtgaaataggagaggggggaattcctgagggaagctgggagatttccaggtgatgatagagtagccatgtgagtatttggctgaaacagagtagaagccacctctgtctgttggacagaggtggccttaacactgagtatcaatcagcatggccattagagctgtccaggacaaacataatgaatgttgtggtggcagagagggtatacttaaatgaacaaaattggaggctgactttccttgtttcttggtagttcctttcttcgtatttgctatttggatatttcacttcacttttgtgagctagactcaaaggttaaatttatatcattgtgaattttctgggtcatattgtagggacacagatgggaagcatcccttcagtttattgagagtatttcttatgcgcatgtgtttttaattgtatttattgatttaataaatagccgatgagatgagaaaaaaatattagtgtcttgttgttgcagagaaaaagacattggatgcattcttagaatttattatcacatgcgaagttatttagatttacaaagcaatctgacatgttgacttcattgctcgtttgctcatttctatcagaggttgaacacaaagccaagcctaagcccgtgattcttctgtgtgcagatgagggggaaggtttaatgcagaatgtttagctgaatatttggattgtgcattccccttttatgtctctactgcaagttttctcagggcatttgtgattgacttctgtgatgttgacatttatttggagttagatgtttaaaaaattactaatttatggcctggtgcggtggcttacacctgtaatcccagcactttgggaggccaaggcgggtggatcacgaggtcaggagatccagtccatcctggctaacatggtgaaaccctgtctccactaaaaatacaacaaattaaccgggcgtggtgacaggcacctgtagtcccagctactcgggaggctgaggcaggagaatggtgtgaacctgggaggcagagcttgcagtgagccatcgtgccactgcactccagcctaggcaacagagcgagactccgtctcaaaaaaaaaaaaaatttactatcttattgtttctctcattttgaatttgtgaaattattattcattttatggacatactgcatggattctgtgtttcagttatgacaggagatctagaatctgggtggggctgtgagtaaatagaaaggtaactcagtctgtgccttgaggaattccgcagtccagtggaggaagaaagagacggagaaataattaggtacagtgtgccaaaggctataatagaggaggtacaaactcttcccagagaaggcaggcagaatttgaactaggtttcaaggatgtgtgaaggtgaactggggtggggagggcttcccagacagaaaaaacagcgagggtgtagagtttcaaagggggaagcccaggggtataataagtgaaggagacagtgtgaaattataaattttggatgcccttaatgagtttgaacttcattttcttagaaatggagtacttttaaatgttcctaaaatggggacgaggcattgatattcatggttcagttaggtttaggagcttttgtagaagtccttttcaaggtctgcttaatctcatgggccagatagtgacacctcgatgcaagggagcatgtaaatgtgctctattagctgggagcattgctatcagaaattacatttccggctctcttcttaagggtaaaggagaggtaggatattgagtggcaactggcattctgggatgtagaagaaatacagtaccataaagggatagaggaaaatgggtagacttaacgttctgaaccaaagctaagattctccgtgagcgattagagtaggcttttgggatttgcttaccttctcttatctgctagccagccacacaggaagcacatctttgtggagtgacagaggaggaggtaggaaatgctttctcatttttatggtagaaacatccaagagctgagccttcattctggctgagagaactctagatggttcagacttgcattcctgggaaggccttccagctagagtgatggaacaaagcaatgatttctgtggccctgtgtggacagcagtggcagtcagtttactctccctgttggttaactgtctttcgtttgatctagagacttcctcaaaacaattttgttgtgcttgttctttgaaagcaacagcagacaaaacaagctttgaggtttttagaaaagagcttgacactgagcacctcttttgagctagatctgtctgtcatgctgaacctgttttctgtggctgcgtagcttttcaaatctgtttatgcttgctggtgttattgaaacagaatgggaagatctatgcaaaaaggaacattgatcttaataaatttatgtcagtaagaatgggactgccattttaaaatttattttaattccttacctattttcttgttcaattattctaaaagtgattaaatgaagatacgtcacagaaagtatgctttgaaatcaagatgtggggaaaacctgtagttctgagtaggcctgatagaatcatcattgttagagtatttggaggttttgtagtagggattttgtcttcacttaaatatttagttgaaatatgttccaatagtttgacacattacagaatctgtctgaaagaaatgtctaaaatatgattcctcagaagctgctcttggttttactttctgctgttggttttactttctaacatttcattttgatcccgcagttttaagagtaatcaaaaaggccgggcacggtggctcacacctgtaatcccagcacttcgggagactgaggtgggtggatcacttgaggtcaggagttcaaggccagcctggccaacatggtgaaaccccgtctctacaaaaaatacaaaaatcagccgagcgtggtggtgcatgcctgtagtctcagttactcgggaggctgagacaggagaatcccttgaacccaggaggcggaggttgcagtgagccgagatcataccactgcattccagcctgggcaacagagccagactctgtctcaaaaaaaaagagtaatcaaaaagctacattatttaaatcttggcatgtctttaaaaaatgttaaactgtcaggaaaattatcacttctggataccaccttcagaaaaacacatgaaaatttgtgcatgtctcaaatagttgttaatttatgaaaaattagaaagagtgtttgaatgtatatttctgtcatattatattgctcatatttttaaattatactttttttcacccgtgaagcccatatagttaagtttgaaaattttaattatattagaatttgaaaattaaataaatctcctttaattcatgcataattttctaatagtcatatagtttgtattatataatttgagaaacttggttctaaaaaaattgtctgccaaagaatgtatatttctgaattctgttctgctttcatacatctgaaaatatttgagctatcataactggctatgcttcaaacccagtctgaaatgggtgacctttgctggctttggattgcagagctgggggctgttgtttgctttatctgatttaaaatagtcagtagtttattttgcaggcagttagatgtatacctttgcataaaatcattgaactgaaaaggttggcactccaagaatacgttgtgagaaaagagaacttgagtactcactctcgactcacctgaatcttattaatattttattgattaatatctgttgtatttttaagtaaataagctctctagaaactatctctgcttctttgttcatttaaaatatattaaacaaattgatacagattgcaaaaattagttgcaacgttcctagttagatatcaatgaaataaaaatggtctattcatacgagttcattttagttattcctactaatatcaaatgtgttttaaaaaatgggagattataatctttttatgaagtaagataaattattactttgtatatttaattcaaagaaaacaaaaaggccacaagtgcctgcataaaggcacatccacttaggattattgttaaggcctacagttgataattaggattcaggcatagcataaatgaagtggtatctttttttttttttttttttttgagacgaagtctcgctctgttgtccaggctggagtgcagtggcacggtctcggctcactgcaagctctgcctccctcctgggttcacgccattctcctccctcagcctcccgagtagctgggactacaggcttccgccaccactcccagctacgtttttttgtatttttggtagagacagggtttcaccatgttagccaggatggtcttgatctcctgacctcatgatccacccgtctcggcctcccaaagtgctgggattacaggcatgagccaccgcgcccagccagatatcaattatttttagacccaatgatatttgctgttgatttattgttggtgcacaaaataagaaaacaaaagcatggttttaaaacagccctttacacatttaatatggaaatggtaacctacaggtctgtattccatacagattcctgggctcattttatctgtgaattcctctgggcgtcatgcatgcccaggactgactttaaagcagaattatccagtagaggtataataggaccgttagatctaatttaaagttttcaagtagccacataaaaaaataagcaggcgaaattaattttagtctgtcactaaattcaaaatgttatttcaacagggggtcaatataaaagctatttatgaaatacattattttttcatattatgtcttcaaaatgttcacatttcacatatttattttttattttattattactatttttttgagacggagtctcactcagtcggttgcccaggctagagtgcaatctagcttgctcattgcaatcttggctcattgcaacctccacctcctgggttcaagcagttttcctgcctcagcctcctgagtagctgggattacaggcgtgtgccatcacacccagctaatttttttatttttggtagggatgagatttcaccatgttggccaggctggtcttgaactcctgacctcaagtgacttgccgctttggcctcccaaagtgccgggattacagttgtgagccaccgcacctgattacatatttcacatattttaattcagaccagctgcatgtcaagtacttagtagccacagatggctagtggttactgtattggacagtgcagctctaggagagtctcttcaacctgcagctgtctaggaagagaatcatagtttctggaacaggtagaatctataagacctcctttttaagcttctccactttacagatgaagaaagtaatatctggagatgttgagttgttcaaaatcacccacattttaaggatcaagagcccagtccctgttctctaacttctaatctctttcttcatcactttttctgcttcatgttgctgcatcccctttagttactaaggtactaacgttaggttgttgctatcagttaaatattaagccaggagctttaagacaatctggcccacttgaaggcatggcctgatttggacaaaacttgtggggtaggatgaatagagttaccaggcatatcttcaacctctctgtggactagtattatacatatatgagatgatgtagggtccagtgatcagttcatctttttctattgtgagcactgttggaataggaatggggggaccttttgggacccaggatatgtgattctgaaccctgaaatgtcagatgcccactaaaaggaaggggagagatggacctgtcattaccttacacattttattgtctgtatgggtatgtaaacatgtacagattataaggaattgcacttcatttctgggcttctggaaacacaggtattaagatttcatttacctccccttgttttggaaggcttattgtgtgtgtgcccatagttcttacccagttacacttaaagtatgatactttttgacagcttaagcctattgcattcctggcatgtaaaatagttattttcagaatgtaagcaaatgtggaaagcttactgcctgacatggagggttggagaagtgggattggtgttcttttgttgtaaactcatttttgtgaaatatttgctttacaacgtgaagcatgcatgatggatgaacttttagaattgaaagttatttttcatttcattcctgaaatatttaccagcatggatgttgactgagtgctttgaagagtttgcttagtcatataacttaggttttatgattttagatttaattaaacttaaagttttcctgtttgatcctcaggacttctcatctgtggcaaggctttactcacaaaggaaatatcaaccttgaagttaagcatgccctgtgtttctttatattctgatgaaaacgattgaagtttgccagtgctgtgtctgggacaatgcttagaggattcatggcttgtaggaatgagttaaaagtacaaggatattggctggcatggtgactgtcgcctgtagtcccaaaactttgagagtctgaggtcagaggattgcttgagctcaggagtttgagacaagcctgggcagcataaggagatcccatctctatgttttttaaaaaagtgaaaaacaacaacaacaacaaggtacaggggtatctgcgtttccttaggcagctgtcttatatacctttaaccttaaaaaaatccaccatttttaaaacagtgttttctgttgtttttcttagtaaatataaacaataggaactgaagtttagggcttaaaatttttgagagaataatttttatttcagtagcttttggggtacaagtggtttcttgttacttagttgaattacgtagtggtgaattctgagattttagtgcacttaagtagggtaccttgtacctaatgtctagtttttcttttaatccctagtcccctattaccctcctcctcgtgagtctctaaagtccaatatgtccctctgtgtgcctttgcttattcctaacttagttcccacttataagagagaacatacggtttttggttttccaattcctgaattactttacttagaataatggcctccagctctatccaagttgttgcaaaagacattattttgttccttgtaatggctgagtagtagtccctgatatatatatgccacatcttctttatcctctcattagtcagtggccacttaggttggttctgcatctttgcatttgtgaattgtggtcctgtaaacatatgtgtacaagtgtctttttcatacaatgacttcttttcctccgggtagatacccagtattaagattgctggatcaaatggtagatctacttttaactctttaggaaatctccataatgttttccatagaggtggtactagtttacattctgagagaataatttttgtaaaattatgtttaagctagatttggaattgggaaagaattacattctttataggaagcttttgaaaaatatatttaaaaatatataaaaatatgcataatcctaccacccacaaatgtctgtattattatgtcatttctaaaccatttttgagattatgctatagattacgttttagatcctacattttatttcttaacattaaatctcatactattttaagttctttgtacatgtaatgtttactgaatgggtaaatctgtttagggaaactggagctatgtagttgtggacttgtgcttttgttttgttttgttttgtttgtttgtacatttgctttttagaaatgtctattcagatccttggcccatttttttttttttttttttttttgagatggagtcttgctctgtcgcccagactggagtgcagtggcgcgatctcggctcactgcaagctccgcctcccgggttcacgccattctcccgcctcagcctcccgagtagctgggactacgggcgcccgccaccacgcccggctaattttgtttttgttttgtatttttagtagagatagggtttcaccatgttggccaggatggtcttgatctcctgacctcgtgatccccccgcctcggcctcccaaagtgctgggattacaggcgtgagccaccgtgcccagacagacatgtgcttttttatttggcatttctagcctgaacataggctggaagtagtgacttagagagggattgtttgccaaatatcaggtaatattttaattatttattatttattgtaatgctgtgaatcaggagtccctaacccctgggccatggactggtaccggtctgtggcgtgttaggagctttgctgcacagcagtaggtgagcaatgggtgagtgagtgttgctgcctgagccctgcctcttgtcacatcagcagggcattagatgctcataggagcgcaaaccctattgtgaaccgcatgtaagaaagtgagagctgcgttgcacactccttattagaatctaatgcctgatgatctgaggtggagcagtttcatcccgaaaccaaaccacaaaattgtctttcatcaaaccattccctggtgccagaaaggctggggaccactgctataaattgctgctgtcaagtagtgttacgcatggtggtctttaacataaaaaaaaaaggtaatgaacgtacaccacacagattagcaaaaataaggaaaggctgatctagtagttcaaacaagcaatcctcttatttaatggttctgtgattgctcgtgtaggcagaagcttaactgtaagttgttgcatttgacaggcaaatgtagctggagctggaatgtagatattagtgaaattgtgatttcagtttactggagccattcagtgggagcatgaagtgggttacatgattacacggatataaataaagcgtcctccttgccacttcactgctgttaaagtctctcctgatgttatgtggtgaaaaacaagtcaaaaacattaattctgtcaagtttccaaagatataagaatctttgaccagaaaagagacggtatttatcttcaaatttaacaaattgtgatgaaatgctgctgttacagaacctagtgtaaggtcgtggagtccattcagccagacacatgtaattttgattattaactgccgtttctgtggtcagtcggccagttttatatatttcacattataggtatttggagcaaagacagtgttgtttattgtttactttaaaaaaatacaatactgtaactacataatgagtaaatgttgatactgttgaaaactaataaaaacaaattcttacactatcaacatcacagaaattctaattgtaagaaaatattgatataatatggaaatccgttcatttatttggtgcattaattgaacaccaacactatgccaagcattgggatacaaccatgaaagaggccagcttcctgatctcacagagcttgtactttgttgggtggggcagagagcaaatcagtcaatctgtctgtctgtctgtctatctatctgtctatctatctgtctatctagatgtcaatcagtatactctgtgccacttggtggtcagtgctatgaagaaaaattaagccagtgaggagctggatagagacacagtctggaagggtatgaaggggatcagaatatgctacccccaaatatgccatttcagcaaagtactaatttgagctgaagacaatcgagaaatagcagacccaggacaagctttaccccctttttataaaaattttgctgtgtgaaggtatcctccttcccctctccatccctggagagaccactagaggtggcaccatcgcctgcagaaacaaaccttattgaaataacccttatcttctattagtttcccccatatatttaccttaccacacttcccctggaagccctaatcccctctcctttgtcttgtgacttctccacagtttattgctctttgttaaaatggtgtgtatgctctcaggcctaactgcttcttttgggtttttgcttttctgtggagctccctcctctcccctccctcatgtaaaaataataacattaaataaaatttgtgttttttcccctgcgaatctgtctcgtcagtttaattggcaaggcctcatgtgctgaacctaacagggtagagaaaaaaggtttttttccccttttctacaagtattaaacctggagagaacaatacagtgtaaaggctgtgaggtgggagcatgctggggtgttggaagaagcacatgagcttacaaacattccatcaatttgcattcattccaaaaattgtatgcaatttttcagtgacgattcccattgatcaatcatttataaaaactaatggtgagggtcttccatactcagtttactcccttcttggaaaagaatgtacattttaatcaagatgatttcatgaaagacattctgtactccaaacatttaaaagagcgtttagagtatacagcaattcatcttttcttctgtattttaaaatttaagacagggagaattattgtattatacttagttcagatttggtggtggttttgttttttggttccagtgaaaagaaattgcatcagtaacctggcggtcaaccgtgccatattgtttgtgatttattagtctggaaaaaataactgtatttctggcatatgtaaaaatagtttgctgagaggcctccttggttgtggcaatagtaatactaattaccaggtactgtatgtagctcattctatgaaccaggccttgttgaaaagtgctttcacttaattttttcttttcagcagcctgtgaggtacctactgttatccccagctgggagggagctggccagtggactgggtttaaactatgttttcattgtctttactcttaaccacttatcttctctgcctccagcaaaataagtcaaagagttcagccagtgtttcttcttggactaagcagtcagcctcctaagtaagcaagccttggaatgcaattgattggtaagatactaaagtaatcagtaaggccctcagttcctggctgccagcttctttcaccctctcctgcaggaagttctgaatgctgatatctctacttggtgtcttctctccccctcccaattccattatttccctttttctcaatcccaagtgaaggaagttctgagtgtggatgttggagtcattcagaccttggatctgagtcacaactctttcaatttactagaaatatgactgcaagaaaatgatgtaagcttccctaaaccaatttccacatctacaaagtatctaaatagattgcttaggagaaaaattgaattaaattgaataaagtgcaaagcacagaacatggccaggagtaggccctggatgaatgagggaaaaatggttctgatttttatttttgagcctctttgtaacatttgttggccccttcagaataatccttagagttcatatcagccacccttcatccctcctgggatgggccaggggagaggcccagttgcctgtgacactgcttcgtttcacatttcactgctttagcatctcaacatttcattgataacatttttgatgcctgaaaacagaataacttatttgtaattctacatacattttgtttgtgatcaagttgttagagtttgaaatgagcctcatttccttgggttttgtccctccccatctgaccttcctcttctcagtgaaccctgaagaaaaaacactagcaaaggaatctcaagaatgttggttcgggacacagctctctccatctactctcctgccctagtcctgcccctccttgtgttttcagcggtgaccaggcactggtgacagccttggctgcttggaccagctggaggtagctgcaaaatgcctgcctgctagctttgaaaaatctctgccaacctcattgaaataattgtttaccacatatcagaggggactgggaagtgggtaattgagagatctttttgaaggggtttgtggcttctccacttgcagaggcttcctgaaatggtgggtaatgctcatgcctcagggagaatcaatatccttctcctaaaacctgctcacacgtagctctaagtattagacatgcatttttgttaacattttatcagtgcatttttctacctgtgtcatttggaccttagattcgggagaaaatcactgtgtatctttggtggtttcaggtggctcttaaatttcattaattcacaaaatctgaattgaatggaatagtctgttttgggaggtttttttgggggggttggggagggattggatttttcagtccttccaagagacttcaggttttttttttgatgttctgattagcccggtgtgtgtaaggccctatcaggtgttcgcctgtgtgatcctatcacacccacatcctgtagctgcatccaagtgctttgaggccgacttaatggggattaacttaacagttgctctgtgggaacagatgctctttgccgcttatttctaataaattgattgagccatttaaaagattttttttttcttttaagttacatcttcttaagaaactgtagacaataaagcaaaactaaaatacttgggtctaaaattagtgtattatatttaaaacactgggcttcagactgattatatcatgctcttttactgactttctagtcagatgcttatttataaaaataaagcttatataaagggcagcattcaaatgttacaccagtcggttttagcagtttgaccttccacagtagctaaatattttttacactgagagaagaattctttaacattatatgctatcagcatgtcaagtgaattctgagcttgcatgcaacagatgagaccctaggtggaaacataaaaacataccagtgtgaaagagaaaagcaggctctctgtctttgggaaggagttctgcagggaggggtgtttataagtgtagtagatacttaggaaaattaatacaattattataaaagtcatctgggaaaaaccattaggtaagaatagccaataaaaaaccagaagcaaaatgtaaagatatagaaattaaaactgcacatcccatgcatagataggtcaatggggcaaactggaagtctagaaataaagttgtgcatatattggaaattagtgcaagataaaagtgtctttttacatcagaaaggggaaagatggattatttagttaatggtgttgggttatctgactgtacatagaaggaaggtgggtaattatttacccagtaccaatactggattacctagtattatgtacccagtacagtttgtcagcaacaaaaggcaaacttttttattccatgaagtgttcttacaaatcagtaagaaatactaaatatgaacatcttcagagaaaaatgaacatttttgaaaacttattatgaaaagaattaaacatacacaagagagaatagtgcgctgaatgctcagcaatgatcagctctcacccagtcttgttttatctgtattcccctttctcaacctgctcaattctcttttccctcactgggttattttgaaataatttcaattctataattttatgtataaatatttcagtgtggatgtctaacagaatctctattagacgtggacaaaaaaggcaaagaattttatagtacacaggaaaaaatacacagccaataaacctatgaagatatgctcaatctcatagtcgtcagggaaatgcaaagtaaaacagtgatataacattgttttttaaaaccctgatgggcaaagactaaaaaggcttgccagattggcattttcatctactgtcaattgataacagatatttctttgcttggagtacagtggcacagtctggactcactgcaacctctgcctcccaggttcaagtgattctcctgcctcagcctcccgagtacctgggattacaggtgtgagccaccacgcctggctcattttttgtatttttagtagaagcagggtttcaccatgttggccaggctggtctcgaattcctgacctcaagtgatctgcccactgcaggcatgagccgctgcatgcagctggtacagaaattttttagatcagtcatttagaattttatgtacatatcccttgatctaggaattctagaaactaattagttcatagtatattgtataaatgcgcacagatgaggatattatgagagcattatttgtatcaactaagcaagcctttaaaaaactcttatacagtagaatattatgctgatacattaaaagtgggcataaccatactgatgtatagaaatatctaaaatcataccgatataagtgaaaacattcagaatgcaggcataatcacagattaaacagtaatttatataaaaaacagaaaatttatatgtgtattatgtcagtagcagattcaagtgaatctgacaaaatctgactctgggcaatgagaacattggaatggaggagaaggtagtacatatttactttgtatattatcaccttttgtactatttgagtctttttaactgtacgcagatactttagagcaggggtccccaacacccagccatggacaggtactggtccatggcctgctaggaaccgggccacacagcaggaggtgagtggcaggcaggtgagccagtgagcattactgcctgagtgctgcttcctggcagtagattctcacaggagcacaaaacctattgtgaactaaacatgggagggatccaggttgcctggtccagtccttgtgagaatctaactaatgtctgatgatctgaggtggaagagtttcatcccaaaaccatcccatcccatccagtctcatgccatcccacccccaacaccccatggataaatggtcttccacaaaaccagtccctggtgccaaaaaggttagagatcactgccttagaggctgctccctcttggcacatcttgaatgtaggactccttggttctgccattcctggtaggtagtcagccagcttttgatagttctccccagagacttcatcccacaggcaagccatcccattccacgtaaaacatctctaatgttaggaaggcacgtattttgatgtgatatctagaatcctcccagctgttcttcagaggaacattacttttataaagttgaaaagaacgttttattgtattataaaactaggtcatttcagtgaatttcatctattttcatgggtaactgattcttatatcaaaacttgcttttgaaagtactggaagcataaattattacttcaggcccatttgctttactttgttcagcacattgaacatcaaggagcaactccctcgatctaaaatttctagcattggtgcttgtaatatcatttttcaagttgacattaatgctatctttggaattctcatggtaagtcagaagaaagcagtttagtggaactgttctttctcccactgaattgtatactgagatctgttatattttctgcattttaacccagaaagttgttcaagagaattgaccatgataagacatctgtagcttattttgtatttttttaatggaaaattgtaactgacttttaaatttaagattgagtgtagcctttcccaaaccaatagctaatgtttttataactatttagtgtaggagattataataaaatccacattgcttaagatataaaatgtttgtgcagtaataggctgtataaaaacagtaaattgagattgtatcaggaataatgtattataaaccatatatgaaaccaggtactaacttggtattctgcatagctttatcagaaaggcagagcaaatactatctcaaaatgaagtataaacaaaatgaggttcagtgagtgatgtggtttggctccatccccacctggatctcatcttgaattgtagtccccataatccccatgtgtagtgggagggaccaggtggagataactgaatcatagaggcggtttcccccatcctgttctggtaatagtgagttagttctcacgagaactgatcactttataagggacttttccccccttttgcttggcacttcttcttcctgccaccatgtgaagaaggacgtgtttgcctccccgtctaccctaattgtaaggttcctgaggcctccccagccatgctgaactgtgagtcagttcaacctgtttcttttataaattactgagtcttggatatgtcttcattagcagcgtgagatcagattaatacagggaggctacataatttgacccaagtagcaataaacaataggggtgaggttgaaatccaggcccctggtacttatggccttaagctaagtgaaataagccagacacagaaaaacaaatactgcatgatttcatttatatgtggaacctaaaacactcaaactcatggaaacaagagtagaagggtggtgttaccagggtttggatgtgggggaagtgaggcgatgttggtcaaagggtgcaaacttgcagttatgagattaatacctaatgtacagcctagtgactagttaataatagtgaattgtacacttgaaaacgtctgcgagagtaaatgttaaatattcttaccacacagaacaaaaaaagtaactctgaggtgatggatatgttaattagcttgattgtgataatcatttcacagtgtatacatatatcaaaacatcacgttgtatacattgaatatacataatttttgtcaattatacttcagtaaagctagggaagaataaaagaagtgacctaaccaggacacctatctgtagctctatggtaaagccaaaagggataataacttttgattatcaaaacttcatcatcattattattttttaagactgggtcttgctatgttacttaggctggtctcaaactcctaggctaagtgatcctcctgccttggcctcccgacatattaggattataggcatgagccatcacacccagccagttttgaaggtatctttattacatttttttgtttaaatatttaatagtaagtgtttaacttgaagcatttttttctgccttaaaattgattttcccactcattttatggatcaaaactattatcagattttaattcccactccaccacattgtttataaaagttgacaattatggaaagtaaagtaatactgaatttttctaatgcctatctttgacatggaataaagattataaaatttcttataacttgaatgagtttttaaaaattggacatctttttataaaaatctagcattgaccatttcaacataagttttacttatctctgaaatacaggtagtacctatttttattaattttcttaagtgatgctgagtgacactatttttgttttttttcactttttctttactttttttttgagacaggatctcagtctgctgccaaggctagagtgcagtggtgtggtcttagctcactgcagcctcggcttcctgggctcaagcgatgctgccacctcagcctcctgagtagctgggactacaggtttgcaccaccaggcccagcagttttaaagattttttgtagagatggggtcttgctgtgttgcccagactggtcttgaactcctggcctcaggcgagcctccgacctctatctcccaaagtgctggaattatagacatcaaccaccgtgcctggccccagtgacactgtcttaattttgaatagggaagtatctaatggtattaaaatggtctggcagagaaggggatatgaggcttggtgaaaataagcacaggatgcaccatctttgagtaagtgttagtttctgcagtgagccagcagcaacattcttagcagagcctagaaagatcgagtgagggctgtgtggtggtgcagcctcttaagtctctctggttccacaacatgctcagattggtggctttgatattttctccatccaggacgcattgtgctaagcttagggaaggtccagtggatatttaccaagcctcttatactgccccgcatgttgccatgagacagcagcgttatcaccttaaatggtgcaaatactccttgtgcataccctacccctgagatctaacatctggattctggatactgtttcctattcttccatcttgctgcatggttcccaggttatgtatatagtgtggctaggcaccacacatggccctggctccttgcagccatacagaggtgacctaactggatgtaattgggtatgtaccgggtgttggctacctgtgcaggttgagggccttccacaggtctagcaaagcaattcattgcctttctgaatttttgaatgcttcatttgtgaaacccttgatgtaataactgttgatattatttctttttgaaaactccccttactcttccctgtttcttcatttgtaaactggaaccgatagaaaagtaccaaacttagggttgttgtgaggcgtaaaagaaataatacagcccagagaacatagtatatactcagcaagtatttattaatatgactactaagccagcattggtgattgattggctcatagtgtcttctatttgccagatgttttcagaggctctgttcatgttcatacccatgtttgtaaatgacagaatgtaaatttcttaatcctctgtcttctcctttagcatcagctcttgtccccaaagtaaaagaactcagtcatccagaacccagttttgtagatctatttttcaaaattgggcagttaatagaaaattaaaagcagtctagggaaaagcctttcctttgggtttgttgctttcttttctgtcataataagactgtgcccaaactgtagggaaaaatcaagaaactgtaaaatacatcatcagggtgtttatagtaaatgtaaaacgttaagtaacatttgagttaatctgtgcttgtacaaacctcagaagcttaaataatgaaccaatgacatataatttagaaagttttcattagactctttgcgttggtatttgcaatatcagatttgcatgtcatcattattagccttcctctattttgagtgttgactaggtgccaggcgtcatgttgagaaatttatgtgcttatttaattctcacactgactccatgagatagatactccattttacagatgaggaccccacatcataaccttttggccagaattacagttagtgttagaatttaaacctatgcagtctcattccaaatcctctgtctttactcctccagaatgctccattaaatgaattgtttcttataatccggttgttttaacgttggaaaagaacttgagaacatttagcccaaccaccctatgaagtttggcagtacttcttgccattctttcaatagataatttatttgagtttaagggagagtctatgaattaacactagtaccaaaactcccatgagaaaataatgtagacagcttttgttaaaaaagcagaatttttaaaggtgttcattcagttatcttcttgcctaacaagttcctgtgttgtgatagactttgaatttgttaaatatgaattggcttcctgattctagctgttttgccagaggcctgatttagagaagggattaaaccactggtcaaccttggatggaatttgggccagcagttccttctccacagcccctgacacttggctttgtgccaagaaaatcctacaaaaggaaattgatttactctacccaagacagagttccggaggctttggttgtccattgttagcttagaagttggcgcagtgtgcgtgtgatccacgcctaaatagcacagccttgctgtgcgtggtagaagttgggttagtgttgacatgctgttgactcaccctcccgaggatggaagctctggcctgggtcaagttgtggtcactgcagttaacagtttgttgatctcagggagtattccacagttgctgatgtaattgacaatgattggagccagctcttccccagattcaaatggaccaattagaggacttgttggttctgtttatcaactatgtaagtgagtactgtgaagttggcattgtttttagtctgtatttgggtaagatgaaactctgttctcagacagtaatatctttcaaaagtacaatgttacttattgtgaccaaagtagggatgaagtttgcaaattatttggtgtaatgatttaatttggccatccatgcagtgcagttctctaccagtgtgattgttctctttgtaaaatactcttactttgccagaaaattgtttgtttgtttgtttgtttgtttgtttgtttgtttgttttgagacggagtctcgctctgttgccaggctggagtgcagtggcccgatattggctcactgcatccttcaagcaattctcctccctcagcctcctgagtagctgggactacaggtgtgtgccaccacgtccagctaatttctgtatttttaatagagacgaggtttcatcatgttggccaggatggtcttgatctcttgacctcgtgatctgcctgcctcggcctcctaaagtgctgggatacaggcgtgagccactgagccctgttgaaaattcttattaataagatgtttctcatagaatgtttcaaaaaattgtgactggtttcaaaatcagatgatttgcaagaattagccatagtataaacacatagttctcaaaccgttttctgggagtgggcccagagatctatttaacaaaaccttgagtagagtctggtgcaagttaaaattggagaaccactaatgtaaccttaccttatctgtggaccacattttgagctttggaagaaataaccctttctatccttcacaaggtaacagatgatttttttgcacaattatttgataatgagcttatatttgagattaaggtatgcacacgataatgtacattctcactctaggtctggggaccttgattctttgactcttctgtccttttctctccagttacttggttttgtgcattaacaaacttttcaatttacttatttttttttacttatttacttatttctcatcccttacgtaatgttgcatcattgttttttgtagcctctgcagttcaagatactaatcacccctttctaccacattaaaatacagactctacctaaaatcatgtatgggagtaacttgatatatacgaaagtgtaaccgtgtcacaattccccgccccaccccgccagtctacataaaactgcaaacactttattgcttaccaagaaagtagacaataatatcgaagaaagccctccttttcctcttctttgaccaacaagggagcagttcctgacaaatgtcagtttgctttttgagttccttaggtttctgtgttgtgtttgcaatggataaatattgagtaacaggtactgactgtattgtatacattgaaaactatccaccaacagaatatttgcaggaggattttgttttgttttgttttgttttgttttgttttgttttctgagacaggctatctctctgtcacccaggatggagtgccatggagtcatcatggcttactgtagccttaacctccttgtctcaagcgatcctcccgcctcagcctcctaagtagctaggactacaggagaggaacaccatgcctggctaatttttttttttttttttgtagagacagagtttcgctgtgttggccaggctagtgttgaactcctgggctcaagaaatctcccaaagtgctgggattataggcatcagccactgtgcctggcttgagaatgacattctataagtagtttcagtcccttagtttaatcccatattttgatcctataacatgtacaatatttgtgtatagtatatgatctgccaactctctaagaagattttaaaacttattatgttaaatttcagacatatacatcatccagcttcaaaaattgaccacattttgctgttcttgtttcagcacctccccctgccccattttcttttctgaagcattttaaaataattctcaggtatcatatcattttacttctgttcataggtttctgaaaggatttgatgcagaatgttattattaaaccagtatacagagagaaaggccactggatattagtacatgttttggtttcagacggtccttttaagagtatattaaatcacataaggattttctgagtacccattagaaccacaaaaaatacctatgatacccttcttactgcagtagaagatgagtttcctagggtagccctttgttgatggaacaaacatgtattttgtttcatcaggaaaatcattggaacagccatgactcagatccactaaatgaaggaacaaaaataggacctgcctcacctcctgatttttttttaaatctctaggatgagtaaccagaatatttttatgttgtgctaagtaggtttgtttgtttgttttttactctgacttatattatttgaattgtagaaatatattgtttttacttttttctttaaaattctatctggagtttctaaatgagagattgtagctcctaaaacctttcttagttttggtgtcttgctttctgttcttagcgtctgtggtcatttctaactcccagtgaggaaagagctctctggtcttgtttctttgttaaatgaaggagcaaacctccgtctcgttgatccactcccaacccacttgttttgtaacaatgaaagttatctcatacttaaaagacaacttgaaattataacacacctgtaacaaagtaaagggtatgggtttttacttaggtttaaaaaaagggcagtaacccttttcataaaaaagcaaaatttagatgggatagaacccccgtttatagaaaagattttaaaatctcatttgctctcattgaaaccttaaccttctctcaaatactggcgcacctctgaggaacttcaaatacggtttgaaaactaatggtttaaggagggccaggcgcagtggctcatgcctgtaaccccagcactttgggaggccgaggtgggcggatcacttgatgttagcctgggcaacatggccaaatgctgtctctactgaaaataggaaaaattagctgggtgtggtggcgcatgcctgtagtcccagctactcaggaggcggaggtggaggcgggaggatctcttgaacccaggaggcataggtgcagtgagcagagatggatctcttgaacccaggaggcataggtgcagtgagcagagatcgcgccactgcactccagcctgggtgacattgagactgtctcaaaaaggaagacgaatggtctaaggaaactagtttgtggtttctcagcggagaatgacattctagtttctacagatctggcaacagaagacaggcacataaactggcctgctttggagtcagggccaagacttaaatccagatttaaaaccagctttttttttttcttcttctaaaacaaccaacctgtgttttaggtccagtgtctgccttgtaagttgctcaaagctcagatacaaggaagtaatcagcacacatttttgtgataacattcctgaaaagaaaaagatgaggtggactaaggtaaatacactgctccttaaaaatccatatttttagattatttataaatcaaatgggcatggttaccaaagatgaattctagaggtgtaaaactccagtcttatacctcaaatttcagttttccttagggagcaaaacacttccatgatcttactgaggacctaaaaaagcctgtacatattttaaaaatagcactccctagataaagcctgatggatccagggtacagtagaatcatgaaattgcctgtttctttttaaaagatgtatatgattgctcggtggctgtatattgtccatcgtgtgcgtgcctgtgtggtatgttggttctttcagagaggcagtggcgtgcagagtgagaggatcacagatgtgtatgtgacaaaactatttcttttctttcttttcttttctttctttctttctttctttctttctttcttttctttcttttcttttcttttcttttcttttttcttttttgagacagagtctcactctgttgcccaggctggagtgcaatggtgtgatcttggcttactgcaacctctgcctcctgggttcaagcgattctcctgcctcagcctcctgagtagctggattacaggtgtgcaccacgatgcctggctaatttttgtatttttagtagaggcagggtttcactgtgttgttcaggctggtctcgaacttctgacctcgtgatccgcctgcctcggccacccagcgtgctgggattacaggtgtgagccaccgtgcctggctgacaaaactatttctaaaacacaagtccagatattcctaccaagggctctctggggcttcgttttgatttatatgcaaaacactcctaatgtggtgacattggggagataaagatctgggatgatgagagagaaaggcaggtaggacacatgcccttccagtaactttccagctagggcttgcatttaacctctgatggaggcctcaccatccaggcagatgtacttgcttaggaatgagtttgagataataaggctaaatgtgctgccttctgtatataatttgcatttgtcctaatgtacgactaaggaaatgaaaaatcaaagtttgagtgactaaaataaaagaggtctgtggagtaattggattgaatttgcaccaagtcaaggagaaaacttctgtattttgtatgttttgtcatggttctatgattacttgttagaaagtgatataaaattcaataacttagtttgatatgaacttggctatctttaagttatagaagtcgtgcatataatgtggctgttttcaacccccataccctttctgagtggttggagatgtcttgaatttcgaagtgagaaggtctggtgctgttacatagataatcatgttagccagctttaccttctgataagctctcaatttaagaaagtacttctaatcctggctttatctttggcttgctatcttattatgcacagagcataattgtaagaagggaataatatctcttgctgtctattcactaagaatagtgtgaggacagggctcttaaaaacatgaagagatgggcactattgtatagatatagagatttgatgaaatgttaaaatgttggatgattttaaatgacaagtggagtggtgagaagtttatttttaaccttatgtggataccttggatatttagaaacatcgaagttttaaggaagaacaaatatcttgactccaagaaaatggtcatgtgatactgtggcatctatttggtcttcctgatgtatatgtttcctgacatttagctcctaaaatccttggaatctccagtgctaagaaggtcttatatgctaatgagatgactggtggctgggtaacctaccatgtgattagagggttaggactttcagtcaccctccccaacctccaggagctgaagtttgagttgataaactaatgatcaatgatacctacataatgaagctttcttaacaaccctgaaggaccgcgttctgggaacttccagatagctgaacacatggaggttcctggagggttggatgtcaggaaagggcatggaatctcgttttctcttcagccgcacctcaccccgtgcatctcttccatctggctgttcatctgtgtgtcctttgtaatatcctttaaaataaatgggtgaatgtaagcaagtatttctcttagttctctgaaggtgctccagcaatgaatcaaaacgaagtaaggggtctggggaatggtagccagttggtcagaagcacaggctacaacctggggcttgtgattgacatctgaagttgggggagttttgtggtactgagccctcagcctgtgggatgtgtaatctccaagtacagtgtcagaatccagttgaattagaggacactcagctggcatccattattggcatgcagtattccttgtcatgagcctgggcaacatagggagacctcatctctacaaatatagctgggagtggtggtgtgcacctgtggttccagctactcaggaggctgagtgggaagatcgcttgagtccaggaggcaaacattgcttctcctccaaatgctgtactttaacatgtttggaaactcctgcaaaggaatttcaacataagcgaagtcaatgggttataaaggactgaatgccattttgtaaatgtcagaaatcaaagtcacaaccaagttaagttctagattagggccaggaagagaaatgtattatctggtcaaccatatcaaatctgtattttggtggaagagcattttcttatattggttctgattggtttgatacggacagggaactgttttctttattccagttatttgttttgttttgtttctgagacagagtctcgctctgtcgcccaggctggagtgcagtggtgcgatctcggctcactgcaacctctgcccctcaggttcaagcgattctcctgcctcagcctcccgagtagctgggattacaagcgtgctgtagtttttgtatttttagtagagatgaggtttcaccatcttggccaggctggtcttcaactcctgacctcatgatcccacccgcctcggcctcccaaagtgctgggattacaggcatgagccaccgcgcccggcctattctagttgttaatcagttaacatagccaaaagatatagaataagattgtagactgaatccatagtctaatgatttgtcttcctagtaattgtgaataattcagacattcaaaattagtctggcatcatacaaacattagactagtcctaaaatgaggatattggcaagtgtgttaataaaaattgcatatgcagtattaataggttccttacgtaggctgccgattactcaggaactgtcagatgttttgttttgttttgtctttgagagatggggcagggttttactctgctggagtgcagtggcacaatcttggctgactgcagccttgacctgctgggctcaagcgatcctccctccacagcctcctaagtagctgggactacaggcatgcaccaccatgcccagctaatttttgtatctttttttagagacggggttttgccatgttgcccaggctggtctccaactcctgagctcagggatctacccacccatgcctccctaagtgctgtgattacaggcatgagccactgtgcccagcccccagatttttaatcttctctttgacattgagtttcagaaatgaagtataaatggtgaatttttagtgtagaatatgatgcactaggaagatcacttacccgtttattcactttcttagaccatgtcaacccgattctgaatttagggttctgttgtgatggtgttctttagaagtgattttaacactcaaaatactatagtctgtaacataatttactgattttttaatttttgcaaactaagttgaagtaatcaagtatttatgagttctttgggtgagaccatctgtcaaagaattctgggcttaatggagatacatatatgttgtgaatactaaacagatatccaagtaataaagcagaaatcatatgctgtgtaacagaaatgtaaagttctgaattagttcacgagtaggagagaaacttttttttaaaggtagaggagaactaaaagtaatttcttaaaagagtgcctattttacatcttgaatattaaaagtctaattcagtgccttgggatcttgttctttttgtagattttgatttgaatgaacttcagtttgctgaaatgtctaatgggtgcaaagtacagatttaattataaggttgagctaaaatcagaatttaagcatatggcatatataataccaatttaatctttcccccttaaatttagttatttttagtgagtcccaaacaccatatttgagacatcacttttttcttttttaaagagatagggtctccctatgtgaggctggagtgcagtagctattcacaggctcgatcatagcaaactacagccttgaactcctggccccagtgagtgtaatgtctcaccatgccaaagtacttttatcttaaattgcttatttttttgtttatttttttaactgactctgtttacaaaattaaccttttatctagtgacagctagattgtatcacatttgtcatctatggacaactgatttttagttgtttaatatggtaagtttattattgtttttccttatttaagaaaacaggatctgagtgaaaaaaaaaaaaatcttaattcaactatcacgattccagtaggaagtagacagacattcatctgtatacattaggtgtcaaagtagagttttgtggtttatcattctgaagatttgagattcaagacatgactatctttcagtcatattgtgcaatagataacatataatgtttctcactgatgagaacagttggttagatctctcagatgacttgaattaggtattagttcaagtcagttgtcagtaagtttggctttatcgttcagaggagcttcttatgactggacatttctcaagtattgccgtattggtcatttggctatcaatgcttaaattatactcagtatagtataaattttcttatttcccttatttaagcatgcctccattacactgttgttgtctctaataagagtttaataatctttgttttggcttagtaaaaagagccaacaaatatatgagtgactgactgagtgtattgctctatgcgcaattgtcttaaaggaaaaacgtttatagaatcactgtgaacaataaaatggttgcatttcgctggaaaacctcggtgctcctttggtaaataatgaagtgttttgttttacgggccttttcactacttcattgacaacagacctttttttttaaattaattaattaatttatttatttatttatttattttttgaggtggcgtttcgctcttgttacctgggccggagtgcagtggtgcgatcttggctcaccgcaacctccgcctcctgggttcaagcgattctcctgcctcagcctcctgagtagctgggattacgggtgagtgccaccacgcccagctaattttatatttttagtagagaaggggtttctccatgttggtcaggctggtctcgaactcccgacctcacgtgatccacctgcctcggcctcccaaagtgctgggattacaggcgggagccactgcatctgaccaacaacatatatttatattacccagtaataggcatagtctaaggaagataatagaatttattcttagtagtgaactctttggcttttgaagcagaatttttttttctttgttcttttctgtgatagtaaggaaggaaggaagggaaggctactactaaaaatataaattgctaaatagaagtcaagtctctgggtgttgaagctcacatattggtgctgtccagacctgacgcatctagaaacaggaatttgcccttagcgtaagcttagccaaatggttgagtcatttctaagtattttaacattatagaatgccttaggaaatgtcatgaatatctaaaacaggtcttcttgaggattttattagtttcttaaaacatggaaaggaacttgattctcagtgctggtacctaaaattcaaagacattagttgtgagttgctgtgctcctcagctctaagccacagttgtcatggccaagcctgtctccttatggagagtggccttgctgtttcctgcagagcttctcttgtgcctggcttgtgcctggaagtcagcgtgtcaccacttcagagagacactatagaagcttggtgatcttcaaacaagaacttaaaacaaagaagttttctttcacagatatcttaaaacttgtagctaaataaaacgtgaataactgtgagagcctcattacagcaatttttaaaaaagcagtacatgttttgttgtatcttaaacatcacagaatggtattgtgtgtccagttttgtttgtaaaatgtaaccttcgtgtgaatgaccatctattcctttctttttggaaggttagtttgtcagctgttgtgtgatgctcaacattttatgtaatgacatttagcacaacgtttcaatataacatctcaggaaaacatttaagaaatagtgaagttctctgggtattacattaatcatattaattacctgttgcttttaatttatcaccgtatcaccctaatatcacaaggcatgtgtagtactattttgtaaagattttctaaagaccttccctctataggaaggaaaatttaattcagaaattgggctgaactctctttcacttgtgtgaaaatgggaaaattagaagtaatttgtattttttattgtgaaatcagtgtaggaacctgtgctcgtatcatggaaacaacagcactaatgtttttctcccctcgggtgtgggctttgctgcagatatccatgtcttctactttttctgttcttagttcttattcacttattgtctatacttcgtgtcactttattgaatttcacaaatgcaatttaggaatccagggatgtgataaaatttgtgcatctgcttgtcattagccatctcacgtttatatcgctaagtgaaaatttaacttagtttggaacaaaccaccatgatttagttcacctgtatagtttaaaagacctaagacctgaaatttttttttttttttgaaacggagtctcactctgtcacccaggctggaatacatggtgtgatctcagctcactgcaacctctgcctcccgggttcaagcaattctctgcttcagcctcctgagtagctgggattacaggcagctgccaccacgcatggctaatttttgtatttttagtagagacggggtttcaccatcttggccaggctggtcttgaactcctaacctcatgatccacctgcctcggcttcccaaagtgctgggattacaggcgtgagccatggtgcctgtccaagacctggaattttacactgcattgggaccttataaaattcttgacttgtacccttttggcattttctgaatgctcatgatttgcttctgaaatattttaggcctttggaaacactccttcattctaatcctctcttttcttgctctcaattcttcatgtcatgtaattattttgcctagagccaaatctgatgtgttattataatcatcatttctgcaggagcttggtaacactcctgcttttgttccctttaaggcttcttttggttttgtttattttgtttcactcagaatgatctggttaagttttgcttgatcatccatttcaaatctcttagtacatttttcaaattcagttccaagcatgttaaatgtgtcacaatggaagtggcccacggtcaaatacattttgggaaaccttggttttaaaaaagttaaactgacttcattattacggttttttttttcaaaagcctccagtatccatcttgaatgatccatttcccatatgtgttttatgacagaattctccccactcccaggtaataactgttgacattttctgaaaactgtttttgagaacactgaattagatatgaaatgaggcatttattcatacttcgaaacgaatgtcttaaacctcactgggccattttgagtatacattactagtgatatatttaataacttagtggtataagcatgcaataacaaatttcttacacaagagaagttctgtgtagaaacaaatttaatactgtggctaaagaaatgaaccaaaaaaatttaatatcttgaaatttgcttcttagctctgtttagaatcattgtgattcacggatagtaaattgtcagagtggacttcatgaaccttatatcagacattctgaaaagagctaaaattgccattaaactgcatgagttaaaatatcttagatagtttaaaaatactatgtagacttggtgagtcagatctgccacactgagcgtgtagctggggttgacgacacacgtgttgcagtgtcgttaccagtttgtctcttttagagacaacttggcaggcagacgtcttgcagataaacaaggaaagattgtctattttaaatggcataagacattctttaaaccagtgtgtcatatgtggttatatagtcagcattttctttagtgcaggaaatcctctctcagggttcctgaataaatagcaggtatctttgtagggatagctcgcaggagatttcaaatgctgtgtattcatcagttcaggctccccagatgtcttacgaacgtgctcattttagttttcttttcttttccctcttcctgctagatacaagttgagacaatatgattagctcttaaagtgcttactctccattttatgtatattactgcattttaatcctcataatatcctgtgaggtgggatgttactatgtccatttgagagataaaggaaatcaagaggtaaagttaactggctttctccaaacagctggtaattactaaatacagaattgacttttgccttttgattccaaagatcatattggtactttcatgtgtgggtcccttcagccagttcctacagtgaccctgacccagctgtaagtcccctgaggtctctagagatatagacagtgatggattagaccctgttcatagttgcagatacaagacatagagaggtttctagcaataatttttttagttatatattttcatagggcttttgatttatgtaacctattagtatatatttgttattccagtagagttaatacattattcaaagagattccagtttttaagccttttctccgtttgtctaagttgttcattatgaaatgattggctagaatttgaaagtctttacctacagagagattctgactggcttgcttggtcttggaaccctagttatgagtgcattgtcttgcttcctggtgaactttgcccagaaatagttaccacctcattttttttttttaaatgaaagctggataattaaccctcaagatttcttaattaaaagattactattataaattgacccacagggagttaatacaataaaattatttttgatcattttatatgaaataattatggggcaatcttctgtaatcttgagttgaaggggttatcttgcttaatgttaataacttttgatacaccaactaccttttaaaaattaacgttttttttttttgcttctgtggaagggaggctgtattttgtaggatttacagtttacatagttattgttttatatgatgtcagttggattaattatgttttgagtggaaactctgtttggttcaaccaatatttgaatgctaattttgttctgtgaacaaatagaaatacagagaacagtaagacatgactctttccccctaagtaaaggcttaggttggagttttcaacctgggaattactgacattttgagccaaataattgtttatgttgggtgggggagggcctacagcggaggctgcctgtacattgtaggatgtttagtaacatccctagcttctacctactagatagatgccagtagcaccacccaagtcgtgacaatcatctttgccaagaactttgaacctctacctagaaacagttcatagggctcaaaaagcaaagtggcctaggacccatgtagttaacaagcttaccctgttggagaaccactgcatagctgaacaacatgggtgagactagtgtcagggtaaaggagctcttgactggagattggccgtacacagaaaacaaagtgagtgttatggatatttggggatttaccttcattagggcacagttggttagcgttaggtgtacaccaacattattccctctttagaaacagccatgcacgtaacattttagcacatctgaagaggcacttctattctaattacctaaaattcttattatctagaattacatgctatgaacaacagcagtaaagtcagaagccagaatctatgtgatgttatctgttttgcgatcacagttgtgttcttctcttagtttatttgaacaagtttgtgaaaaaatttttgtgcttatgtaaatactctttgcttagattttttggtagaatgtaaatctttcccacacagtgcaatacccctcctgcccaagggcgagatatagattgtacagtttgttatttctgtgttttagggcttattcctctgtagacatgtcaaaaagacatccgtcgggggtaaggaatgcattagcaattcaagctgataatctgcatggtgagagtccagataattttttccccaggtcacataggcagctctgcacaagtctgttaaacatatgctagttttgaaaattaaaataagttcccatcactcaaggcaatgaaacgtagatgaattgctctgccagattgactcttagaactcctgatgtgatgtggggctagacagaatgggatgtttgctaataaatcagggaggtagtgattgttttccttctttttctcccccacccccgtcaggacaaactcacattctgtagcctggtgcactctaataatgcctgttgaccttggccatgaaagcactctagactcaccccctaaacaccgcaccgaatgtgctcatccttgaaatttacaagccttagaatcttccctacctccactcctgtttactgcctcctgttactcctggtgcttccagtcagaccgtagtcttggctgtgcagtacctttaggagccctcaaaaatgtttaatttcttttaaaatcagaaggaaaaataaagaacaagataataatcatgaatatacaataatgaatccagcctgacttagagttgtctttataccaatcaacagagccctaaaatatagcttttaatgtttttttaagagagaaagaggcccacgaaagttgtcctggggcccccgcatcctcctcatacactggtgggatgctgctcttgcttgctttggaatgtggcagcagctcccagtgacttcacacgtttattacaaattcaaggtcatttggacgctagccttgtgctacctttcatgcttcctgtccgacccatactcagcctgggcatgttttctgctctgatctttggtctgccttccttctccttctccaagtcaaaccagtcactctttcctgagagctcttcggtgtacccttgccagacctctgcattaacactccagcacctttggttagccaatttggccttatttgtgtctccaccattggattatctgtccatcaaggtcaggaatgttttcgggttaccccactgtccccaactttgaatatgttcactgcctggaaaatgtttatctgaatataaggcatcaagccagaacttgcccaaaacttaacctaggactcaaacagctttgaaatcttatctgtgtagagtgggaacggcatgtgtttgataaccatcagcatttgctgttttgcttagccatcaacaatccgtttctatctcttcctcatagtattttcagctgtatttttgtacagcagtcattcacgttaggtgttaggttacactgaaatctctgacaaccagttctgtgctactgaaggcttttagcagcaggattaaaaaaatagttgattgcacattcgaagtctcactgctcacactgtttatgtaattcttggagtccagttagatcatctgatttttaaaatgttgcctgaattacaaaggagttcaggaatgtgttatcaaagaattaggaaattaacattgaaatttattgagcaacatagctaataggttgtcttgctttttaagccttcttgttttctaggaggagcctgaagtccgtggacaagttgaactgtagctggtatttaggaattggtaaagacagaggtgtggatgctatgttttcttttctctgttaggaaattactctcctggtgccacaataaaaaatttcacaggtatctaaagtggaatttattttgtattgttccacacctttgtcaataattacattttctaccttctagtttattactgttattatttttcatgccaggtgtttcttaattgttggcataagtatttattgaatgcttatatgtgggagtgagagagtcaggccagtgctaaagagtagggaataacccctagacagtgaagtaacttttgtcttgtttgcacattaaaaaaaaaaaaagattaggaatccttgctctatatactagaaatgtttgatgttctcttttcttctcttcaaacagagaaaacttagatgaatacttataggctctactgtcaactaactgcaccctcctaatattggcgtctgcatatttttaccattgtcaatatcagattgcctctgatgttgtgtcactgaaactgatagtaacattacatccaagagtaagactgcagtgtgatttttggctcttggtcttctgttctttcggcaacaattttttataaatatagtcaagaaaatagaaataagagtcttcactgctacctccccttcagaattattttctcctagtattgtggttcctgatagcctttattcctatagaaatggcaattcgaaaaattccttctgtgaatctgagggctctacaaagggagagcttctttgatagtgctttggtgtaagttatttaagaaggacaatctacccaggcttatcaagcaaataacctggaatttaaacctggagtattctttagtgttccaagtctgcaggaaaagaagtaatcttggcttaaactaaataagttaacagaatacaatttgaacaatgaacaagaatgctgtttgaaaattatcttgggtttttatgtcaagttaatattctcactgaatttctattatgtttgtaaagcagctttctcctagaccaaaaatcctagtaataaaaccacaacagtatgagagttataagcacacagtaaaggctgatgagtaaatgttatgacactttgaaaggaaataaaccagacgatataatgtaaatatcctttgtgcttatcaaaaataagtgacttcatgttctgttcctgcaatatttctgtaaatctgctaaaaatagaaaggtaaaggtctaagatcataaatctctgatgccctttccttaaaagtaaggaattcttgtcttggattcttatataatatacttatttataatctcacttgttctgattgcaggtggcctcttactatctttacatccatgtgaatgtgtgtgctttgatgtgtacatatgagagacaagaacaaaagtaaatgtcaaatatccgaattcctgtttcagtgagctttcacggagtaaattctttttgtctacttgcctgtgatctcttctaatatgacttgcgttaatgacctttaagaaatcttttaataaaataaaaaattttattaaaatcttttaataaaaaaattttattaaaatcttctaataaaaaattttattaaaatcttcttcatacgtgttacttgaatttactcatggcaaggaccagttagtaccattttatgaaatcacaagctcatgggcttgtgataaaacatataagtgctttaaatttggcattggtaacggcaggccgactcacttgaaaaatgctctgaactgctctgcctcatgctggtgggaagtcagatggaaatgactttctagagagtttagctggcctccaagcttagtgggtactcactctccttatcccccgatagctgctctgagattttaatgcacattgaagacaatatgataacttaacctggaaaattagcattttggtaagggtctttaacttcattagtattttcataccactttggtattagaaattgtaaagatattaaagggtatggacaatgtggaatgtatgtaccagactcagcagtgtatactgactccctcactatagcccagaactggaaatcccgctaactacctctccccatcctagcctgaattgccctctccacctatgttggttttacaatggcctgacgcctgaaagctggtagaaactgtataggaaaatagggttgggataaatttctgggctgacaaaggatagaggaatatgcttctttttccccttgtccaagtatatcagcaactctaagatgcagatttatcagtatggctctactgggcatgttctagttaaatggtagacccactacctcttctggaatcttgttttccattatattcccacctgcagcttttcaaagacttattctcttctctaatggtctcttggttcttttttttgcccatgctctacgttccgagtgggtcaacattgcagtgggtcaatgagaagaaatagaggggaaaaataaaagaaccagaaagaaacctgttaagtttgcacttacttgtgcattaagcatattagcgtaagccttaaactctagaaaactcactgtagtgctgtaaagtaccactgataaagtaaaagttcatttttatgctgtgtcgttatttagtgatgaatatgatattgcataaaagatgaggatctgtaaggccaggcgcggtggctcacgaggtcaggagttcgagatcagcctgaccaacatgatgaaaccccatctctactaaaaatacaaaaattagccgggtgtggtgacgcgcgcctgtaatcccagctactcaggaggctgaggcaggagaatcgcttgaaccagggaagtggaggttgcagtgagctgagatcacgctactgcactccagcctgggcgacagagtgagactccgtctccaaaaaaaaaagatgaggatctgtgtataactgccaggtgttgtgtgaggtaccatgaataacctggcaatatcctaactgtgcaggtatgaggagtgacccccaggaatataattgcaattaaacttgcaaattatgtggggatactctatttcagggcaataaaataaattatgtctagagctcataactcttacacatatttggctaggtctatgcagcaaaacccaggtgataactgaggctttaactttgggatttgtttggtgctgactctgccacatggtgaaatttggtaggatctcagtgcgagtgtcacatgatcagtctgcttgacccaacatgccagaattccatttctcagcccactctcttctctgcatacatacctacctcccggagagggctgggcgggagcctacgtgtggcaagagccctcactgcttttgttacacagatttcaacacatatggcttgatggagtgtgattgcagtagcatgaatgtttggtgatgaaatttgcatgtcctttgctgggagaagtataattataagatttttgtattcacatagccacatgtgaggtatgagcaggaacggggtctatttaatagcattagattgctttcagatttgaaatatttccttttagaaatatattgtgtaaacaaaatatgtttaattttttttaaaaactatgcctttgtacaaattgtttatcatttgcagaggtctaaaaaatgtaggagaaaagaagctcacaaaatcaatcagatctaaagattgcaaagattgattaccatctccttaaaagcttcagtacatgtgtttacagtatcattctatttgcctctgctcagattctttccaattctaggacaacccaaagtgtatagatcataagccataactgatcctaccttacataatacattaaatataaaatatttatggccaggcatggtgaccagttctgtaatcccagcactttaggagaccaaggcaggaggaacacttgaggccaggaagttgagaccagcctcggcaacatactgagaccttgtctctacagaaaaattagccaggtatggtggtatgggcctgtactcccagctgcctaaaaaaaggcaacttgagaaagtttctaccttctgaaacaatctatgccttgattctatcacttagtattttagttattcctatcaaatacatgactgtgttaatttcttttgccacaaaaatgctgcaaagccacaaactcactccaaaatttagtggcttagaacaataaccatttattatagcccacaagctcaagggtcagctgatcccggcttagcttggctacatttgatataaaacagtagaaatttagaaattgaatatatgtagaatatctcttgtaccaaaaatgaagaggaataatagattttgatttttctttgttgtattctgtgctgggtgctaatctgtcctagctgtcagaacaagtagaagccatactggaaaatcatttatttgttactatcaaatttatttcagtgaatgccattcaaaccactctctctgaggagcccagttaccaagtcctccaccttgttagcaacatggacttaaatgcactaattctagaatgagatcttagcaaagtaccagcatttgagatttgtgcaaattgagctcttaaactgtgtgtatatgtgtgtgtgtgtgtgtgtgttcattctagcactcccactacataccatacaagtagctgtatagcaggtatatatacatgtgtatatgtacataggtaggtatatgtcaactgttgaaaaactagaaaatacacattaaataaagtaagggttgataaacattagtagttggaacattgggagatttggacttctactttgcagattcagttggctgcattagatttaaggaaagaactaactttggagaaatttgtgtttgcatttcaggagagatttcttaaagaggaaactaccagaggttagtagatattaacatctagtgatttaaatttgagaaatgcaaattagacatttaagctgtgggtttgcttcccgttttacttgctctaaaagtaatttttttaaaagccagtaacaaagacatgcaaaatagtactgccatgggggaaaaattacttgaaaataatattcaagattgaagaattaaaaaagcttgacatctagtaccaggaatgccagctggcttgttctgtcaaaaagcaagcatgtgctttggaataacactcttgagtagactctaggcgggttttgagcccttctgattatctaaatagatgtggaagtgacttatcttggtttttctgagtcaaatgagataatgagcaaaggccttagtaggtctttgatttttgcctctaaccctttttctatctgcatgttcacaaggtcaaggctgatgagatatggcaatattgagagagtcagaataggataaagatctcaaatactatatatatatttttttttcatttttttttccctttggtgactgtatgagacatgtcagtaaaactttaaagacaggccaggcgttgtggctcatgcgtataatcccagcactttgggaggccgaggcgggcagatcacttgaggtcaggagtggcaacatggcaaaaacccgtctctactaaaaaatacaaaaattagccaggcgtagtggtgcacgcctgtagtcccagctactcaggaggttaaagcacaagaatcgcttgaacccaggaggcagaggttgcggtgagccgagatcaccccgctgcactccagcctgggcgactgagcaagactctgtctcagaaaacgaaacaaaacaaaagacacacagaaaaactgtaaagacagaatgaaagagatgaactttttacatctcgctcatttcatcacatactatatagtatgtgtatggtttcatatatgttagtgtgtgtgtatgtatatatatgaagttaaaagaaaacattcaccttttaagactaaatggacattgactagattgtaaactgtttttgaggctaagagtttgtttgccatgcataaggctctattttttgtaattccacttttatattcatttatatcagtcctagcagtagatgccactcttactgggtcctgcctaaatgcatgcttcaaatgttggttattaatttcacgagtagtgaataacaaagactcctattgagggacctcttgatttcctactgggcaccagcagcaagcatgacttactggccttcttatgagtgggtaggagttttgggtcaacttgagaacatctatcctttgagtagtaaaaaagcttggtattaggttggcacaaaagtaattgcgatttttgcaccaatctaatatcaacagaggccgtgaaaaacatcaagggaggatagcttgtaattagaagccagatcaacagtgacccaaaaagaatttcaggtttccaggagtgaaatatgtagattactcctctgaaaggaattgtttttctcctattcgctttcatggcaaatcattttttaagccgaaactcaagctctgaaataattgtgtagcaaatagtggctgtgaatagatgtggcaactctccacaagggtaaatagaaaccacttgcagtttcagtcatcacattttatttttcttttttaatagcttctctatttttgctcaccacaaatacatgcacacacacacacaggggcaaagccttggaaaattgcaattttccattttaatttgagagacagcccggtcacattaacagaacccttgacggaataggttgaattcccttctctgtccctataaccccatggccttggacatatccttacctggtgccctttcctccctcttatggtccacttttgtgattctgattttaatttcagttctctgttagtgatgaaatgagcaactgcagatgttccgcttacactggaaatacttttttggcatttaaaagaaaaccctacagatgaattattcccctgaaaggggttcactcagattttctagattatgattctagaaaatagttctttacatttgacaatggagaatttaaatgttttaatatgaaaatgtaaagcactcttgtggggtatagttgaattatgcccaggttaagggaatccagtatttatgtcaggaaaccatggatgtgatagaaatagtatcgctacaaagctgggcacagtggctcatgcctgtaatcccaacattttgggaggccgaggcaggaggatcacttgaggccaggagttcgagaccagcctggccaacatggtgaaaccctgtctctactaaaaatacaaaaattatctgggcgtggtggcacaggcctgtagtcccagctacttgggaggctgaggcaggagaatagcttgaacctaggaggcggagaggttgcagtgagccgagatcatgccactgcactctagtctgggtggtggagtgtgacagtgtatccaaaaaaaaatactgagattatgcaagaatctgactcgaagaagtttgaactgattaaaaagtaccaaatacttcattatatgaggccagctatttagactagtcagcgggtggttcaaatgcagaaaacagatggctttcattagccagaaaccttaaaattacataaatccacggatgcaactaagctatggatctgtgccctctccttgccaaacaggacctctcagctagcaaaacagagagctccttgttcacttttccctcctagttgagaccctgttggggaggaatgctgccaagcctgctctataaggaattttgatctcctagatgataacagagagaaactttttggagaaagggaacaccctgtttgaaaggacaacaagagaacttgttcaagaaggtggctttgcatttaattgaaaattgtagcaactgtaggcgtagggtttccagattcacatctgcagactggtccagattaggtatatatgtttatattcgtttatgttatccccttaagcctcttttaaagccatttctaaaaattgctttggaaagtccatttcacttcagtattctttatattgtggctcaaaaatattttttttctggtaacaaaaatattttctttctgtttttaagacttgtagcatttttaagtttgatatgtacgtctctgtagttcagagcacttggtaaacagcctcttgcttttgaggcaatttatgaatgcttcattgtttttagctggttattttgttcattgtcaggaacactgttttcccatgggaaagcatctccagttttatgatgtcagtggcaagtcattcagtttacaagaattaccttcatattcagtcttagaaaagcatagaccacaaacggccagttatatcacagttctcatcttttaaatgttgtcttagatttttgcaaagtaatcttaactcaccttagaatagtgttaagacataaatagaactaaaatgtagtagttaagtggttatatttcccatctactaaggtatttatatttcttttcttttagaaaataaaaatgtttaaaaaattaggaataattatctttaggatgactttgtaagactgtgcttttttactggcagcaaatacctgccagatttcaggtatttggcaggtaaattgaatcttaaaagatttcaattttaagagtgtccatattaacagatcctgaataggaccctgtgtatcatttattaagtcatttcttggaggcttcactcaggaaaagggagttaacccttggatggcaatgtttaatgtggccacatttccttctggctgaatgccagggagtggctgcgcttagcaaccaggctttgtttcataaatgggttatttgatgcaggtgaggatgccgtgagttgtttgtcttgttttaattcagggagacaggcatatgtagtgaaagcatggaattgtttgcagatgggcttcagtaagaataggaaggtttctggttcaatttgtatctccaagctaattgctctgatttccatatacacatctggtgttggttcggggggaaaaaattttacttgagaaacatggcttttgtgagttgatatttatttgtgaagggcctcttgtaatgtcaaatgtaagaagatctatacacacaaccaattttacaatttctaattcaacagcttaccctattattgaggattcgcagtttaaattattaaatgatctccacttgaagaaaatagagcatgttaatcatcacgattctccaaacatttatttttaaagttaatattaaatctcatctggtggaaaacctgacaggaactgaagcatatattttctagtctaaactctcattgttaaaatgaagacaacatgagacagttatagcgccgtaatcaagttatttgaaaaaaatgttttaaaaattaccactttttggtagtcaacatacacacatatgccaacagatggcattaaaaaatggcaagaacatgagacaattatagggtcataataaatttatttgaaaaaaatgtttaaaaaattaccactttttgatagtcagcatacacacatatgccaacagatgacattaaaatagctgtaaagtcaagaagcagggaggatgacaaagtgaaaaatagaagaaatcaaaggaagttaagtcaaaagaggaaaaaaaaatgaagcatttacttggtttgtcaggtagggtgatccagtgtattttgccaaaaactttcctggttttagcaccaaatgtctcagaacatggcagctgatgacctccctcacagtgagtgatcccagagagcaatgaagaattgtgatgcccttcatgaccttgttttggatgttacacatcatcatgcccttcagtgacctttctggtagcaaagggtttgtttttaaaagagttgcagcatctttaagtctaatatatacatgctcggaagttacaccatcatcacttctgctgtactccatttgttgcacagacagaccctgatacattgtggagtttcccagggtccatgaatagcaggaggcagggactattgggggccttcttggaggctggctaccctggggagagaaattgtcaatttcctctccttgcggggaggaaatggaatcaagtgcatttgtattgacaagaaggtagaacgctttccttagacattgtaatgaacagattgtggataaacaaaagtacagagagagtttgaggcagaggaggagactgtttcaacagaatatttaccagctatggtaaaggctcattagtgtctccgtacagttaacaacatgctgccaagactggaaatctttgggacaggaatgaattcggaaggtgaacagaataaagtactgtgggaacaatggcgattccattagtggattgtacattccttacgggcagggccctccatagcatctgatgtagggccttatccacaggtatctgattattatttgactttctttaatgtttttgcagtgttattatctatactacttatttcagtaagattgacaacatttgcatttcgatttctaagatcaagacaatgaatttcctcttaatccctcaggaaagctgtgaaatttaaatttatagagcattctacttagcctgctgctttgcatctgtcagagaatgagaccccccagtttcatggaagtcacaggaagtggcaaggggctcagatggagttgaggggttctagctatttctgcagatgatctggatattttggcatcggctgctttgacttaaccatctggcaatgtaaaggcagaatttcgttaaatattggaaaagttacttgaaaacatggctctagagattttgccagcagcttttgcactcatgacttggttcaatctaagacctgttttgtttttttgttgtaaggacctaagtcctctgttgggttttgacgaagtatgtgtaaaaatgactaaaatggccagaggtatcttattttacatttatgtgggaagaaatgtttggaaactgtttcatttctttaactgaaaatttctcagtgcaattttagttggtgtttttcctcctgtggacagtttttaggaatgatacaagttatcgtggaatcacccagttcttgagtgtgtgaacgaatggcttctgctggaagttaattcttcttggcatgggtgtctcacatttccccagcagctggatttgacaagggagggcctatcatgattaatatgccttctaattgattggtttaataacacctttactcctgtggatatatttttcatttcttgctgaatttttttttctttttgagataccagaacctgttaagtgacacggtatagatatttcaggacttccattttctcttttaaaaatatttttgtaaaggtaatgcctgtacacagaagagtttgaaaatacagaaggcaccctttttcatgaagttattttgtgaagtggtctattgcctgcaatggtaatagctaggaccccttacttactacccagcaggcactatgtagagctccaaatgagaaaatgttggctccttgcagatggttgggagaggagacaccagcactcttaacagacttgttaagagttgagactgataaccagagaatattctgggggaaaccaggagggatcgccaacatactcagttatatttgtggatggtgaattctacagtgaatttttctgttcaaaatcataatacagtcacttgctaactaccaacgccatacttgctctcagtgctgagaggtggcacaaatattattttcagtcttggtcatcaggcagggcctggcaggcatcatgctctgtgtgagtcagtggagtttattataagaatgcggtagcctccacagtgattatatttattataggaaaacgtgtaattttgttgtcagaacctttcagcaggtaccacaaaatctcatatgggaaaacgtgtaaatttttcatgaataaattcctttcggtattggtaatttccttctctgttttagtataaaagaaagcattgccttataggtggctaagaacatctgtagcatacataacacttaatctaaaggagtgttgaagaccgggctgattcctaattgagaatgagcaagaatagaactctttttgatagttatccctgttcttcctccaagcctctgccttggagctatggatactataactaactgaagcttcttctttcaggtacccactgatggtaatgctggcctgctggctgaaccccagattgccatgttctgtggcagactgaacatgcacatgaatgtccagaatgggaagtgggattcagatccatcagggaccaaaacctgcattgataccaaggaaggcatcctgcagtattgccaagaagtaagtcctgtccggtggctagcaattcacgttggatcacatgcatttgttttcaaaaaatttaacttcttgtattttgcatcagtattttaaccctacagtaaaaatcttggttcctaatgattcaccataccattaatatatttatttgcattaccctatgatatacatataaatgtttttaaaattatgatgtcgtattatgaccatcactaaacagtagtttaagatgtcacagcacttttttttttcctcactctgtcacccaggttggagtgcagtggcaagattatggcttactgtagccttgacctactgggctcaagcaatcctcccacctcagcctcccaagtagctggactataggcacatgccaccaggcctgactgattttttttaatttttagtagagatggggtctccttgtgttggccaggctgtctgaaactcctgggctcaagcgatcctctggctggacctcccaaagtgctgagattacgggtatgagccaccatgctcagccctccacactcctttcatcttcagtatatatctcaccacggctctacagtcaaggtcttttggttaaaagtgctagcattaatttttttctgttaccagcttgatacatattttagttcatttgtatctgtttgtattctattatagtttggttttttcctcccttattaattttactttttgactatcatgttagttctatgaaatatactcagaaagctcacttttcactcattctctattgataaacattttcattgttcctgatttatttttttggcaaaagaaaatacatatttttccttcttgtacaaaaaaagtacaaagttcactgttctgcactttgcttttttttttttttttttttttaacttaactttgtatcctggaaatcatcctttgtcatttcgtggagatcttcatttttgtttaattctttgtagtctttttgctgttactatacagggtgctcctttcttattcaatttaaaatagctggagttccaggcattttatctcacacttcttagatagttatctctgcatgtgactgcatcttaagaacattagaagtaattagtcttatgcttgttggcaaagcagaattctcgacactcattataaacagcagatagcctggcaacattttcttttgttgtaatcctttttgtactagaaatttttctttagcctacttggataatgaatgtttgttgtttaattaatattactattctattgagatccttttattttaaattgtaaatactaaaattattattattaaaaggtttaatttgttttgatagcgctctgtttaagaaaggacaagctctaattactaattggtgttttgagaagcaaaaagcatctacattatcacaatatattacatattaagtaatttttatcttgaaaggagtatgaaccatgatgtgaaatgatgaatagtggaaatcactaatacttaagttcattatatgtattttttgttttgttttgtttttttttgagatgacatcttgctctgtcgcccaggatggagtgcagtggtgcaatctcagcttactgcaacctccacctcccgggtataaatgattctcctgcctcagcctcctgagtagatgggactataggcacccgccaccacgcccagctaaatttttttgtatttttagtagagacagggtttcaccatattggccaggctggtcttgaactactgacattgtgatccacccatgtcagcctcccaaagtgctgggattatagccgtgagctaccacgtatggtccattatatgtatttttacaagaacattctgtgtgctgatttactaagtatggattgataataaatcagcttttgcctgggtgtgacttttataaagtgtcaatgttagaaataatatttacattctgctgaagagttcttgtagtacaattgtgtagataagttataaattttataaatcagaactctgtgcatacttatatgtttttgataccatttttttgatatatgcatacagactatgtattctgagtgtcaaataaactttttttaaaggctagaattaaaatttagtttatgacattgaccaaattgtccttttctggtgaatcgactattttgatacatgtgtcatagtttgcatctaagtttttcttcccttagtttcacgtatgaataaccagatgttttcacatttgtatggtggccataccaaaaattactcttcttgaccccaggaacacccctcttttcccgtttcacttagagatcctactaatgcctgggtagctttactttctgtcttagcctgttgtttgtcccagggtgtattagtctgttctcacattgctgtaataaactacctgagactgggtaatttataaagaaaagaggtttaagtggttcacggttccaaaggctgtatgggaagcatggctggggaggcctcaggaaacttagaatcatggcaggaggtgaaggggaagaagacacatgttcacatggccagagcaagaaagagaaagagtgtgaagggagaggtgctacacactttcaaacacccggatctcatgagaacactgtcacgggacagcactcgagggatggtgcttaaacattgaaaccacccccatgatccaatcccttcccaccagaccccacttccaacactgggaattacaattcgacatgagatttgggtagggacacagagccaaactgtatcaaagggttgagcacagagtggttcttcccagttctggactttaccagattgttggtggccaccatgagtggggagaattagccctttgctgtcaccttcctcttgcaattctggtattatctgtcctctgcctaccacccacccacggaagtcttgttggatgatacacaccagccagattcttcaacattaggcgccataagtaagaaagggccaaaacatcataccttgtgagccattttaatggatttgggctttattttgtagcaacaggaagtcactagactttattttttatctatttatttttttctttttttttcttttgtttttgagacagagtcttgctcttgtggcccaggctgcagtgcagtggcacaatctcagctcactgcaacctctgcctcctgggttcaaatgattctcctgcctcagcctcccgagtagctgggattataggcgcctgccaccacgccgggattttttttatttttagtagagacagggtttcaccatgttggccaggctggtctcgaactcctgaccttgcgatccaccctcttcggcctcccagagtgctgggattacaggcgtgagccacccgcacccggcctagactttattttttcagagaagaggagtgattgtagatttgcatttaaacaaatcaccttcttgctttatcactatgtcccctaccatatatcttcgttctcccagagactgccatgctgcagcctctagccgtgtgctgtccagtactgtagccactggccctatgtggttgtttggcacttgaaatgtggctagtggaaactgatgtgtgctataagtgtaagatagataccgtatctcaaagatataatgtgagaaaacctgtaaaatgatcacattcatttttatataggtttaacattgaaatagttatgttttgaatatgttgttaaatacatcataaatgttactgagttgtaactatgtgattaaaattgatttcacttgtttcttttgacgtttcacgtggcagtgaggaaattgaggttccataggcagttgcattctgtttccgtggaacagtgctgttctctgtgctatcccgagccaccagtgactctgagctgtaagggtcttagatcccatgatctggcaagtgggagagggaggtagaaatgagtccctccataccttcaaccagaacttcactgcatgttgcaagtcagggaacaaggcttgtttggggtccttttaaatacatctttcattaaatacatttggatgtaagatgattatatgcctttctagaaccctgtggtgctctcttcctcctcagacataatgtctttggatactaagggtgcattgatgaacagaacacagggcctgttcttcaaagggggagaaaagcttgtaaaatcataattttagcaatctaaaaactacatggtgacagtgacactaataccatcagcattgagcattcacaaagggtcacaaagggtcagctactatgctaagtacttgcactcattttacccactcagtgacacctgtggagaagaaccgaaggaaagcaccttggggaattgcagcattgaaggcaaacaaagagagacgattccccatgagggagatgagcagtggccagagagataggataggaagtaggaggcgttacatgctggaaggcaagccatgtaaatttctaaatgaggggaaagataagagtgcaagcatgatgcaaacggaaagcagttgaagtgtagtttttgacatggtaaaatcatgtctgtcatgcagactgaacacatgtcaaatattttattcaattcattaatgagatgaactgtaagatgtgaaaaatggttcattttgacttggagagatttaaaattccttccccagcacacttgagttgcatggctatgaacaggaatcatctggaattatctggaatatcgtcaaattatttccatggtacaggaacacttgcattgctatggggtgtctgcagtatccatctttacaaagctctaagggtgtggaatagcttgtaaggatgtaagtaataagggtgtaagaattttaagggtgtaagtcgtaaaatagcttatttagtagcaagtcaactggaggaacatgctgtagaatcagataatcctttccccgccaccctcagggtctgcaagacaacacctgcatttcaatgctaggacacccagcaatctcttttgctcatatcttgtttttggacatttgtatgtgtgtgtgacaaaacattgttaggatctggcaaatagaaggtcattgttgaccctgtggaatagcatggggagaagttacgttgtagtccattgcaggaaaaacaacgtgggtcaatggtgagtcagctgtggactcctggaggaaagacctagaggcaaaaagctttgaggtcattgaagacaaaaggaaaggctttgtgattttgatttttaaatggaaggaatttgggcctaaggaagcttaaactaaactgtgggaaggactgatacccatcctaagcactagttgcaggtatctcttaagaactaggttttggccgagctccgtggctcagacctgtagtcgcagcgctttgagtgagaggatcgcttgggcccaagagtacaaggttacagtaagctatgactatggtattcagttctgtaagaactaggcagaaaggagatccagtggatatgtgattgcctgggtcttggaaaggggagggaacatctccttttctgaggaagaatggggagatagggtgggttaattaggcagtttcttttgccaggtgataaaaaccccctaaacaatttgtattttatatatggagaatattttctcccactgatgggaaggatcgtagtgtgggggatgcttacccaatttcttaaaaatgtacacagaaatgagatccctaggtgctggaaccgagggtcagtactgcctagaatttccccattagggtctcttttgtttctgcttaccttcctgctgtgtgtttactccttttctcctgctaagatgggtgtcctcaaggagaccagggatgttggtagccacgacctctggtagtgttagtcctggtttggcatcccaactttgttctgcccatgggcattatcagggagtgcttctggttggcactgctttgagttacacgtctgcccttggagccaccaccgtatctgcagggactcagtatcaggactagcccatcttggccttgtgggtgtggccgtgtgatgtggggagaggagctgttgccagaagagggatgaggaatggcatgggcaaaatagaagaatgaccccagtgctgcaacacagtgggtatggattagaaaaggcttgtaggctggacagggcgaggtgagggagtgcatcatgcattaggattttaagtggctttttggggagtattgagcaggtggcaggggagacaagttcactcagaagttttagacagtgttgacattttctttcaaattgtgcatcttgaattctctagaacattctttatagatatttcaggatcttcctgccactttccacattgtagctattctggtgtttttcttttataattagaaataatgaatagttctcatttgtaggcttggattttcatgcgtgtgttggaaagtgttcgttttgccttttttttttaacttcatgtttttattttttaaaccgtattgatggattcattgctaggaacggcaaggaaaagaatactctcacaatgttaccacgtttccttctcacaggttttataagttgtattatttttatattttcaaagttataatcttaccatctcctctgttgccatacttctcattcatagggtctgtctttaactggactcattgtttacagctagtcttttcatcagatcatctcaaaccctgtattacattaatattttgattccgttttgttggatgactttcatcttaatcattcttattgttgaacaatgtttttcttattattgaacaattgcttcattaggtatagaattcctggttgatgggtgtttgattcagcaccatgaaaattcacggtattctggtatctgtcattgggcaaattcttcttctttttttttttttttttttttgaaaaaaatgcgtggaaaccattagttaccattgacagagctactcatttaatgattttttttttctcccaatagtggtggatgaattttttactttgcgttctcactttgtgtctctcatgaccaaaatattttagagataactagctggctaagtctgaggtggctgttaacagtctggtcctaggatagaacaaaaccaacagaactcatcaccgtcacgtcgttttgactttttgctcacaagtttaactcattgtttaatttgtttttccaaaggattgctttgcagtatacatgttggtgcatagcttaacatgatgataaatacataactttgactgtgaattatctactctgctcctttcatagtctcatgcttctctgaatttgtattttgtgttactgggttgttttgttgttatcattcatagtgttttttttgcccttgattctttgatccaggttttggtcaagggcaaggttcaagagaaaaagtaaaaacacagtcttttatttttgctcttggttataaacccttgtaaagtttgattgagaagataacttggatcttatggtttaaattgagtctttgtttaatcccaagtcttccaaattctttgtgcttatgtattctttcctctttcccaatcgtaatagttttgcttctgcctagtcattggtcaaatacctgcctttcaatgcatttaaaaaatattttgtgttagcaccatttgagatttttccccccttttttttcaagtatgtattgaggactgttatgggatgaatgtttgtgttcccccaaaatttagatattgaaaccctaaccccaggctattcggagatggtattcggagatgatacctttgggaggtgataactgttagatgaggtcatgagtatgtgcccccgtgatggaactagtgcccttataagaaaagataccaaagagcttgcctttttctccctgctcaaacgaagaagtcacataaggacacagcaaggaggtggctgtctgcaagcaaggaagagcggcctcaccagaactcggtcatgctggcaccttggttttggacttccagcttccagagctgtgacaaaagacatttttgttgtttaagccattcacagtaaggcagcattttgagctaagacaaagacctactgtggcttctgtaggcaaaagccctacagacccaaagtgttgtgagaattaacatttctagggatcatgccttacagtggattttatccaacacttagctctgacctagagcacgctagtcgtcgttaggtaaatgcttgtggatggtagtttctggcacagagattggagcggtaatgggcaggagttctgtatccagcttatgctgagagagcttcccataaaatggagcctatactttccttttgcagagaccatttctatccattgatagaattcttttttttctttttcttttttttgacgggatctcactccatcgcccaggctggagtgcagtggcatgatgtcaacccactgcaacctctgcctcctgggttcaagtgattctcatgcctcagcctcctgagtagctgggattacaaggtgcacgccaccacatgtggctaatttttgtattttggtagagatggggtttcaccatgttggctaggctggtcttgaactctagtgatttacctgcctcggcctcccaaagtgctgggattacaggcatgagccactgcacccagccttccatcgacagaattctaaagacatgtttaggcaagagttggtggaatgttggcgtgtagtccagatttgccttcagtttgtttttatccgcttcaaatgcaaaggccatgataattcaatagtaaagtcataaatccatagtatgacttaaaatatttggttgtaatattacaaagtatgcttccaaacacattaagcatgcaaaatccttatattgttctttttgtttagtgtttagggtagtttgtgtgaatcatagatgaccacagtagactgttgagttgttattttcttttgacattctttgatagaaaacagtgcttttcctctgttatttatactagaagcaaaaagtatctctcatagcattatggaaacaactcgaatacaactacgtcaattattcatcttttttttttttttttttttttttttgagacagagtcccactccatcaaccaggctggagtgcagtggtgcagtcttggctcactgcattctttgcatcctgggctcaagtgattctcgtgcctcagcctcccaagtagctgagattacaggtgcccacaccattctcagataatttttgtatttttactagagatggggtttcaccatgttggccaggctggtctcgaactcctgacctcaagtgatccacctgtcttggcctcccaaagtgctgggattacaggtgcgaaccactgtgcctggcagttattcatcatttaacagcataaagtggccacttgctttaataaactattatagtaccaaaattttggcctgaggaatttataaatataaatagaacaaaacaaaaataatattccccttgaaacatattctaaaaccaggggctaaaagttagaattgttagattttattgtcctgtttctttgggatgaaatgaaattttttaaaaaccatagttttggccgggcgcagtggctcacgcctgtaatcccagcactttgggaggccgaggcgggcagatcacgaggtcaggagatcgagaccatcccggctaacacggtgaaaccctgtctctactaaaaatacaaaaatatttgccgggcgtggtggtgggcacctgtagtcccagctacttgggaggctgaggcaggagaatggcgtgaacccgggaggtggagcttgcggtgagccgagatcgcgccgctgcactccagcctgggcgacaagagcgagactccggctccaaaaaaaaaaaaaaaaaaaaaaccacatagttttacttaaaccaaaggctttgggattccagaagaataaaggaagtgtacttcaattctacatctcaagaatctatttcttcccaaatttaatacaggcaaatttagtctatatttattgggcactgttaggtttttgtgtcaggtgttgctgagtggcgggataccattcttggcccataaggaccttataaatctattaatacaattaaattgtgaagaaaatttagaaaattgcaaaggtagaatgaggttgcaaattggagggtcttattctggagataggtggaagctatggcagatttttagcatgaatgctttctggtcaagacacttttagaaaaattagcttgtttccaagagtagattagattggggagagaaggaattcaaattacaaaataatagtgtgaaaagcattgtgggagatcatcctgtccatcccctcattcatgatatcctgaggtgctgtattaagggcatcattgctctttgtcacccgagcagtccaggaaggctgcctgttcagtcttagactgtatcctcacagtcttaaaccatatcctcactttatgatagaaacacacaggcaagtgttgtaagagttacatattgtcagttaaacaagaaattggatgagtccccatactattcttcctcttttaaagagagaacttgggccgggtgccatggctcacacctgtaatcccagcacattgggaggccgagtcgggctggtgacgagatcaagagatcaagaccatcctagccaacatggtgaaaccccgtctctactaaaaatacaaaaattagatgggcatggtggcgcacgcctgtagtcccagctactcgggagactgaggcaggagaattgcttgaactcggaggccgaggttgcagtgggccgagatcacgccactgcactccagcctggcgacagagtgagactccatcccaaaaaaaaaaaaaaaaaaaaaaaggaaaaaaaaagagataacttgaaacaggctcttccagcctctctattcttttaataacatgcagtgcacttcttggagctaggggctagggtctaggggcttcttgaaggtgttgatgtctctggtaacttacactgcagggcaggtctctggagggaactttgaacaggttaagcctcaaatgcaggcagagatttccaattgggaaagttaggtgaacgtggctttatcatctcttttattggtttatgggtattttctctttttcctgttttctttcccaccatttaacattatctgttctctgcctttttaaccttctggctttaaatgaacagttgcttaatctatagattaacaggatcagcaaacaaagcacagcagtgcctgcacaaagcagaaactgcctgttagatgagttgagcaaaaccatttcctttgcccaactttctcctctaaaatacataactgaacatgggattcccagacacgaattgtttctcaacctttctttttccattctacagttgtatgaaattaaaattaaataaaaagcaaacaacagaggtagtctttttaatcttaccgagttggaaggtatactatatacattatcctatggtagaaggtctggtacattcttgaccattattactttgctatgggcacccttcacccttgtaggctgaaaattggcaaatcataggcacgtatacattgtggttttggaatttgaaagatctcaaattcatattgagtgagacagtttttgaatggagggatcaggctgtctatatgtggatatattttatgcatttctggtctgtataaatgtaaggattgctttactgaccgtagatttcttctagggttaaaaagttgaagccagtttggatattttaaaataagaaaattagccctacattgaaagagagaataggaaaatctaggctatgtgtacacatctgcttgtgttttcacaattgtgtcctgtcctatttatttttatttctctcccatctcttccctcccacccacaatttgtttttcattcaacactttgaaattagaatagcttatctatcaaacaaggttctttgacaggattttccaactctgagtatgaaagtgtggatataacaatatatttatatagaatgtcagaagcagagtttggccagattattgggaaatattctaacgccctgcagcattttaccgcctttgcttttacataaggccatcatttggaaacatagcatgctgatacctcccattattgcagtagcgtttcatcagctgcacgctgcctctcagcgcctcattaagttgcaagcagagaacgttttcgttttccagttctctttctcaattaagttagagattgtattttcagtattcctcattattaaaagaatttttgttgagaatagtttaagatgtgatatttctttgtattccaggaaaatttaaagaatgtcattgaaatccagaaacagaagtatatattgtctaggacatgctttgtcttggtttatatgcctaagtccgagtagtttaaaatttatgattaatatactctttgaatgcttagaaatggcatcgattttagttgttctagtttcatcttaaataaattggagtaattactaactcaggattatgatgtgctacacataaaacatttgcagtgatgtctggtacttaggaaaccctcagttatgacatttttcttactttcttcttggatatgttctttgaaaaagggactggtatggaaaagctttgagacgatgaaaatatacaagataggctatctctgaaacaatttggtatagagcatttgattctctgtttcatgtatatattcatatatgctagctgcagtcatgcagacacaatttggatctgggtttttttttttttcctttttcacatgcagttataaatttagaaacctggctgtttcctctggactaaatgtatttatttaaattttcagtgctttaaatgcaaaattacaagcatatgtacaagtagaaagaatagtaaaatgaaccctcccatctatctgtcactgaattgcagtaatgatcaaatctagtcagtcttgttcctgagtcagtctggaatgcaggttttttcccttaactattcaggttctccagcaatcctggcaaaacacatgcgggtttcagctcatctctttcagtgacctgtaaattaagatgtgctaaagcatcacatgttactcattgacgttttgttaatatatttaaaacattttattagtaccacataatttttagcgttttcaaaaagaaataagaatttggctaaaggtgaattttaaaaattgaatgactaagtagaaaagtaggcaaactgttttcagaattagtagcaatttccaattccatttactctgttcattaactttgttttcagccttttgttagccatgtttgattttgtgtttttgaaatacctttggtcattttaggacttttggcattaatcacctgtcttaggtggcctgtttacaaaagggacttttcggttctccatttgcccttaatgttgggaatagagacaaagtttctgtaggactctgacaacatatggctttacaaagtttttttttaatatatacatttctcttcttggctttcttaaatatcatcaatgtcttttcttgctttacgtatttagcaacttaaatgtcatcttgtctgagatcaatatatttccaacttggagagatagtgagaagagagacttcagatttttaaaatgtggaacaaaacattctgatggtgaccaggttttaaggtatttcttcagtagacaaaactacttaggctaccgatgataagcttttaatattaataataattattatatataaaaatattaatataatatgatctaagattgtttctattccccctctttcctggttgttaggatttggaatttcttatgcactctttttttttttttttttttttttctgagacagagtctggctctgcctcgcaggctggagtgcagtggcgcgatctcggctcactgcaagctccgcctcccaggttcacgccattctcctgcctcagcctcccaagtagctgagactacaggcgcctgccaccatgcccggctaatttttgtattttttagtagagacggggtttcaccatgttagccaggatggtctcgatctactgaccttgtgatccacccgtcttggcctcccaaagtgctgggattacaggcctgagccaccgcgcccggcctatgcactcttaaaattatttcatgtactgatacattcactttcaatgataaaacatggctgtatgaccaggtaggtaggctgcttttcagactcctgtactaactgaatgggccccattagcccaagtgagagcttaacttgtcactcttcctaaatgccttcctcagctgagtgcttatttacagtaatctactgcttatagcagatgctatgatttgtataagctgtccatatctacttggaagaacaatattgaaaggcattgagatacttactttccctcaaaagcccataatccaacaactatttagaatatcttatttaagagataggtttataatacccaaagggaacttaatgtatactgaaagtccctgattgaatggattctgaccttaaccagaaatattaattacatgcttatcagacacttactgtgctatcccagggtttgccactgttgagggaacaccagatgaatcatattgtccctgccttcaaggattatatattctaataggacagacagcccatcagcagaataggaggtagcaagtggtcagggatcagataaagtgatcaaggcaagtggaggatgcagtggtaggacagaatggtctgcgcacagagattgagggcatcatgtggtgggaattagtgaactagcatgcaagccgggcctttttcttggcttttgttcaattggaaggagcataaagctactaaaggagcttatgtttagaaatagggcttattgaaggggacaaggcatctcctagaatccaaatgcacatcccaagacttaaaagagttagagggcacaggcaggccctgtcagatccggtctctgccagatccagtcttgtctgtttctcatcttcccttgtctctctgagtattccctgttttcctttcctggactaactgcttcttccagatgcctagtttgagtccacccatggttttttgggggcttttctttgtttttttgttacgttctgtttttgttttttgtttttttgaggcggggtctcactctgttgcccagactggagtgcagtgacgtgatcccagttcactgcagcctcgacctcctcgcttaagctgtcctcccacctcagcctcccgagtagctgggactataggcgcaagccaccatgcacccatgggtgttgacatgccacctgtggctcagacttatgctcacctccagtcaagtttcttccttatctaacgacagcctttgtgtgttcgtgaaagcccttgagggaaagaatgctacgtacagtttggttttcttgggctctaataagctataggggatggtgctgcagagtttgaaatacagtcactaatgagtcctccttcagagagctgagggtgggagcaccacataaaaggagttgggggtcagcagcctcctgatagtctgaaagccaaagatgatggatgtggggctccacggggaggctataacatgccacgttatgttttctgcccttgaggaaagcttcttttcaccaggcaggcagtacagatacaaacttaatagcgatgtgaggcacactgataaataccagaaaacattctgtaagaggggttagcattatttcactgtgtgcagaggaggtttgtccatgtggggggaccctaatgggcgtaggcatttgaagtgtagtctaagggatcttaggtaagagtgtgtttggaacacagtgtacgtatttatacagcaaatgctctgtgtggctataatttaggaaaatttgtaggacttgaggacagcttatttttctactagctgacagaggcttgggtttgcttctgctttaagtataagtatctcgagtccttttttaaaaaggaaaatcaaggaaatagttggaattgggtttcacataaaaaacattttagaaaagaaggggagtatgagagttaggatttgctaatgtttgctgtattagcaaattatttgcaatgcttgtcatattagcaatacatgtatgttttggaaaacacatgcaaattaagcagcttaaggaacttttatctttatttcctatgtaagatttgagatgctgcaaagaaaatattaaaacattgaaccgatacttacagtagtcctcctatatctgcagaggataacttccaagacccccagtgaatgcccgaaaccttagatagtaccaaacccaatatatactatgtttttttcctataggtacatacctgtgataaagttgaatttacaaattaggcacagtaagtaattcacaacaactaataatagaatagagcaattatgacactacgccaccatcactactcttgcactttggggccgttattaagtcaaataagagttacttgaacacaagcgctgtgatgaagtgatcaatggcaggtagcatgtacagcatggagacgctggacaaagggatgattcactttctggactgtgtgggtttgagatttcatcacactgctcagaatggtgcgcaatttaaaacttattgttggctgggcatggtggctcatgcctgtaatcctggtactttgggaggccaggacaggaggatctcttgaggccaggagtttgagaccagcctgggcaacataggatgaccctatctctttcttaaaattaaatataggccgggcacggtggctcacgcctgtaatcccaacactttgggaggccaaggcgggtggatcacaaggtcaggagattgagagcatcctggccaacatggtgaaaccctgtctttactgaaaatacaaaaattagccgggtgtggtagtgggtgcctgtagtcccagctactcaggaggctgaggcaggagaatcgcttgaacctgggagatggaggttacagtgagctgagattgcaccactgcactgcaacctgggcgacagagtgagagtccatctcaaaaaaaaaataaattaattaaataaatagaaaaataaaactcatttatttatagagctttctatttaatatttttggactgaaactatggaaagcaaaaccacagataagggaggactactatagttatgataaaaatcaggaacttaatctagccacgagaacatttgtatttctgatgaaatttttattcttgtctaaaatgttgaactatatttatatttatatctttaaatataaatgaactatatttatatctttataaatgagctatatatttatattttatataaatataaatatttttatatctatgtaaacataaaaaggctttttttcctctctggatgtttactggggttatttaataaaaacctagggatgatattgggaatttttgttggaattttaaattttaacgtgtttgtttctttttttgttttgtttcgttgtttgctttctgagctgggagttggctgtgcatgtggcagttgctttatcaaaagggtcttgctctgcttcagaagaagttttgttaccttgattgctaatgttctcccccttaaataaacctcctgatgttggaacagcaaaattgcattatgtttggaaaatctaaattaataatcccttatctctgaataaaagtaactgaatcaggttgaatttactgcttccattttaataggacagtaggaaaaaactatgcatgggctttatgtggttcaaatttttttttttttttttttgagaccgagtctcgctctgtcaccaggctggagtgcagtggtgtgatctcagctcactgcaacatccgcttcctgggttcctgcgattctcctgcctcagcctccggagtagctgggacttaacaggcgtgtgccatgacgcccagctaatttttgtatttttagtagagacagggtttcaccatgttggccaggatggtcttgatctcttgacctcgtgagccgcccgcctcggcctcccaaagtgctgggattacaggtgtgtgccactgtctccggcctggttcaaattttgtaatctccacatccatctgcatattaacaattgtcattgttggtgttatagagagagaagctgaagcacagaaaataacacgcatgttctagatttcctggtgggaactggaagtaaattctgtgtttggctgatcactgtataaagttctagtactagtctttagggaaaagccccgtcttcatggattttaatttgtcaatttgcaattctacctacttggaaatagtcaacctaatcagttactgccctgttgcaccaactattaccataggaatctgaagatggtatgcaaccaacatgaaaaagagatccttttctcctggtaatcagtttgtaccctacaaacaattcgttggttttaagttgtatagagggaaccatgatgtgaatatgcctgccactgggtttatagaaaaccgatgactcctgaggaaattctcagcagggttgtctttcagtgaaaagaaccctttagaaagatgcagtaactcacactttactgcacataaagtcatgtccctcagggtggactctcaggtgtcatacagtttatgactcatgagtgctgcagctttgtgatctaataaacaagtaaagacggtgggagaattatattcctgtacaaaaagccacttcacctttcattatataggaaaaaagccatgggaatattaaatttttagtggcatttttagagcattttctgtgatctaaagtgcctgcattgagatattaagatacttaagaacaaagtaaaataaagagaagtattaatagcaggatccctttggagctaggttactgtggcagtggtttcaagaataactctctcagcacccaccccaggattctgatttagagatttctttgtgtgttctcttagcatatacctctaccactgagtttatcccctgctgctacactgattgataccttatttttaaatttttgtttttaaaatagacggttttttagagcagttttagattcacagaaaagttgagaggaaggtacagaggtttcccatatacttgctacctgcacacatgcttagcctctcctattataaacatcccccacagaatggtacatttgttacaatcgatgaaccaacattgatacatcattagcacccaaagtccatagtttccctgagggttcactcttggcggtatacattttttgggtttggacaaatgtataatgacatatgtccatcattgtagtaccatacagagtagtttcactgccctaaaaatcttctgtgctctatctgttcatcctccccctgcccccaaccacccaaacccgtggcaaccactgatctttttagtctccatagttctgccttttccagaatgtcatatagtgggaagaatgtcatatagtatggagcctattcagatgggcttctttcacttagcaatattagttaagttcctccatgtcttttcatgggttcatagcccatttccttttagtgttgaatgacattccattttctaggtgtgtaccccacagtgttatttattcattcacagtaccttattttttaactgatttttttggggtctgggactaaggtgaggtaaacaaggcagtcaggaattgagattaagaatttttaatgtaatatttttaaaaatcaaaattactgcaaaaaaactccatgatgaacaaaatatcaactttttagacagagattgagtcacgctcaattgacatcaagccatgcatagttctcctactgccttattaaaatggaagcagtaaattcagcctgattcagttacttttattcaaagataagggattattaatttagatttgtcaagccctctgaatgtcatggacaattgtgagtgaaattccgtgtatcgtctaactccccatggatgttatcttgctcagaaaccttgttctccctccaaggaaggcactacttctcctgtagccttctcaggtcgaagttcttttctcaaaatcctcacagcgttgcccctagaggtgggaatgtcctcttttcctcttcatttcctcttttcctcttcatttttgtttccaaaccactcttcctttctcttccctaaaagcccccctacctcagcttgaagtgcatgctttcagacaaatcactttgctcctccacctgttggtcatctccagacctctttctacctcatcgatgttcaccattcagactttgaagattttagctcctgccttgctgtcatcaggtgtagctgctcatttgctgattcttaagtgatcctaatattgatctcaatgatccttccagtattccaatttgtcagttcatgattctcatccctccagtgaccttgttttcatcattctccatcacccattgcttacaatggtcatattatactccttgcaatgaccaatcactgcaactcctccaaaattttaatttcaattatttgactctccaagtactacttattaccacctcactttctccagtcctgtgcgccatacattctttagcccctggagtgtgatcagtggactcagattccactggtccctaccaccttttacctgtgtctaattcccctcatgttctcacttttgccacttgagattgcatggcccagcattctaatcattcccttgcttataccgtcacttctctattcgttgttatttatctggcaaaacaaccaccctgttgcaatgcaaggtttatgcaagggaatgcacattttcgaaatagatttttatgtttatgtttttctttcaaatctctactcattaataaatagaagtggtttgatatttcacaaatgtgatttaattgatcaagtttcacatttcattctaagtgctcagttaaacaccatgatgtattcacaacagtaatcaaagcaaggggctgtagttagttataggagcaaagagaattcatgagtttatttttatctaaatgacacccttgataacttttcgataagttattttcatgtaaattacttggaataagagcaggatttttatatagaaagctttctatgtgtcatatcctgtaaaatgtttgtccgattagtgagagatagggggaggttgaattttactaaacataatatccccagccatatctactgtaacgtttgtttaggacattacagactattatcctacaccaatttatttcacatcaaaaatcaccccatgcttgtaagaatcctcctttccccctcttgtttctattttagctcccctggaaaaataatattttaagtctaaatgagtacaataaattaaaaagttgcattgcttaatattttgaatggaatagctagatgcttgttcatttgctatctttttctttgtactgaatttctttagcttggtcagaggtagagcaggcttgactcttagtggatagtggtataggttgagtatcccaaatttaaaaatccagagtccgaaatgctcaaaaacccaaaactatttgcatgtcaacatgatgctcaaaggaaatgctcattggagtattttggattttggactttccggattccagatgctcaaccagtaagtatataatgcagatgttctaaaatcggaaaaagtcagagaccttgaaagcacttctggtcccaagcattttggataagggacactccacctgtaccttacagtggaggcttgttagatgcttgtaaatgccagcccctgcctcaagtaacaattgattctttttgtgtgctctcccaggtctaccctgaactgcagatcaccaatgtggtagaagccaaccaaccagtgaccatccagaactggtgcaagcggggccgcaagcagtgcaagacccatccccactttgtgattccctaccgctgcttaggtgagccggccggccgtggggctggtgttgattgggggcctggtcttgagggaagaaaaagaggatgctcctgttaggtcacatacacagacttgttcttcagcacattgccactctgtgttgtactgtgttttggactcttgcagttacattctgtgcactgaccctataggagcagtatttttgagttccctgcctcagaatgaatttacccagggtgtatattgaaattacaaattcctgggccagttccaggactcctgaatgaaaaatgcctatagtagcggatccgggaattcttattttaccgtatcgcatagatgattctcatgaacaggggccttgtgtgtttcttcacatagactttctagaagaaagaatctaatgtgaagctgcagcattttgttaatttctaaaaaaaaaaaaaaaaaaaaaaaaaaggctgttctacaataactactcctcttatttggtgatagtagaggaattggaattgggaaggctttttttctgcttacatcaaactggaggaaacagtctgattactaatgtttaatgtttgttttgtcacaaacctcaaatttacctcaacattttatttaaaaaaattgagtagttttatgtggtatcgtgctcttttcctctggaaactgtcatactccatatttaatctaacttggttattagtctgttcctagttgttgtttttatgtgaccagtcattgcagaagtcaagttctttgctctggtatcttacatctagatgttttccacaagtgtattcatcagtaggcaggttgtaaataaggatatagagattgtctgtggagattgtggacaaatattgatgtatattctgatgacttcttataaaggttaaaaggaatatttcaaagaaaatccaacagcaaacttacaaagtaaggatatttactgaagattccggagatctatgtaatatatggtcaaaaatgaatgtcctaagagcatactgattgctgttcattcatgtgcataatttgagacataaaatgaaaacactgggcattagaaagaagatttcacctggtgaatttacttacaatgtaattgatgaagagagtgtagaaaactagatttcttaaacatctgataattcaagagtttcctttttcctccttattccttgttcctatatgctttataaggcctcaactcttttctggttcatcaaaaagtgcagtttaattagatgaaaataagcagcacttaaattctagatacagaactcctactcaaaaaaatatagaagtcatctgtccccaggaactgtgtattttatactcacttagttattacaccaagaaataacacacagagattgaacaattcagtacaagttaggaagtagatcatgagtctgttaatttgatgggccaggctttgttaatgatttgtttcttttggttcttacttacctgttctatgaagtattccaaatatattttcattagaatgtaagctcactgagaacaggtagggctttggatgggcattattgctcctggtatgacactcaaaactgcagtcatgtttcagaagtgaacttatcattttacatagatttttctgcttcatattctattcagaatgatttgtattaaagttgatggaaagatgaaatccacattaagattgttatttactacctagtgccagttgttgtagcaaatatcctttgaaccccaggtctattttatcctatctgttgatcacttcctttgcccctgctcttcaagcctcctcatctctgaaaagctctccttccactgggtgtggtggctcaagcctataatcccagcactgtaagaggccgaggtgggaagattgcttgagcccagcagttagagaccagcctgggcaacataatgagaccccgtctcttaaaaaaacaaaaacaaacaaaaaaacctccaagtgaacgaacagtacaacaagtaataaaggatataaaagatgttctcagatctcaatatcaagtcagaagattttataataatattataattacacggagactgtccaaatatttgtatttgttgtgctacactgcattatgcaccatttagggaaacaacagcctaagtaatgtggttttaaataattaatctcatctaccaaatacctgtttgatagtaaagttaatgacctgtcctcaccttatgtttttaaccattatggaaagagaaccacttgaaaatatatcattccactgacagataattacccagctgtgaagcacaggctggagactggcaaggagaaatggagagaagcctataaaataattctttctcagggaaggagtttattcctgccaaggctttgccatcaaccattatcagatttctctttcatcctccgaacagattctgggctcctttgatgtggaggtacataattcaaaaagttgggtcacttgtgacatgttaagcaaatttctcagttctggttgtgtctgatgtgaaatgagcacgttgacactaactgttcttgactactatgggactagataatcatttgctatttcctgtaggtacttggcgtgttgaatcattttaccatattttctcattttatgaatcactggtccttttccattggacctgaaattagaccctaatatgacaagtagagcatatgttgtctcttactttgttattaaccttagattagaattaaggaatataggtgctgcttttttcttaggtagtggcaaattttccaaaggtctcaagcccagagtataatacagagttgataaaataacctggtagagtatgtagagcatgccttgtctttcaggaaaaggaactgaaaaacataggttttccaataggtgtaacataggtaacatagggacataggtgtaactgatgtacattttacttgcacttaatagacaggcagtgttagttcttcgtctctcttcacaggctatacaactaccaagatccagagaggttgaatttcttgctataactcacagcaaataaatgggagagtcagcactacagtccaagctctcttgattattggtccagtgttttttacagtatacacaaaaatttgttttaaaacaaatattcactatgaattagagacaatagcactaaaaaagaaactcacagctatcgttgtgttgacagaggagacaaccatgacctagtataggataaatctccatgtgatatgttttctactttatagtagtagtaggtaacattcttacatattattcctgcttaacaaagaattactgttcagcattaacataagtatgctctaaaatctcttgactgtatccaaatatatgttttagacaagagttttttttttttactgacctagcaaacaaaataaaattatcttaaacattaagcgtgttaaaattcaaaacaaagcttgaagagagaaaaatgcttgttatgtgtggcatacaaccttcctaacctctttatcagatgaaggatccagtgtggcactggattatttttctgtaatattttgcctcggacatatgtgctatacatttcttgtctgcatggggaaagtatgtcaggttgctgttgccactttcttcccatggagtggataatttcccttgagaataagttggctttctcatctcaccctttgcttttggtagtacctctggaaccagagggtaagattcatcttaatcatgtgaacattttattaattatctcatgtgtgattcaagcacatcattactgttactcaaggagaatattttctttgcaaagctttcaaccctttccatttgaatgactgctcttcatggtgtaatagatccactgttgaaattggcacttttctgtacttgtctctgaccagcaaaggcaaggaacattgcgtaaaataaattactgttgaattattggggcaaagtcaggttaatagcttaatccaaaaaaggaattacaagtgaaagaattttaccttaaatgtcattctgtttcattttgtaattaagaccttccaaatgtgtaagtagtaatgaccagaaatcttatcagatatggtcaaatgagaaaggtattcaattcatattaattttgaattttattgttttaatacaattttaggaaaagcatgccttgttttctgggtttcttggctgcctttgtatcaattatctacagctatcttctttagcatggaaaggatgtatttgaatactgtgacattttataccagggtaattctttgaatttatgtaaacaacaactctcttgagacacatcagtacaacacaatagtcagaaatgtcacatgagagttcaccaaactttaaagatggcgatgaggatggaaaaacatttttattgtagactttaaggatcttgtaaatccccgtatgtaatccagtgtgctagagaattggtgcccatggcgcctcctctccccaccgacctgcactgtggaaatcctactaattttgaagtcatgggagatgcatgtgtgggacctatacatgcactgtgatgagaatgatgacttcatcattctcattatttaatgagcccagctgctgcatacaagaaggatgcaaattcttgaatgttcttgattgtttacatcatggtctcataaggaatgaccagaattgctgggcatttcttcatcaggaaaggctaatcagccatccttggagagacatcagactcctttatatgtggccttcccatgggacctttgaatggtcaacgttaatcatgcttcagaaccagcatactaagtaaaagaaaacatgtccggaaaagaaatcttatcagtgtttatctcccaacagtgggattacaggtgattttgattttatttaagcaattttctatgactttgtataataaatgagtagcttttataatcagcaaaagatagactatgaaatcagtacatataattttgtatttgtatgtagtaccattgaaggataatagaaaaaagtcaaaagacttgaaagtcgacacagaatgatcattaatttgttttatctcttggtagttgtactttatgagctttatacatacagtatgggaaaatacactttagttttgaaaacaccatgatgccaaaataaaagaaaataacgttcattcatacgatcttcaacaaaatttaagcagcattaatcatcactgattcttcaggaagattcttgatcttccttaattttttttccctccaaaattgcatatggcagccacatttgtttcaggccagaaggaagaatgggaagagcttacatttatctcacagattccttctgggtgaggaagacttagaaagtgaagccctcttccatttgattaagcaagaacacctataaaaatggtgtcttcggccgggcgcggtgctcacgcctgtaatcccagaacttcgggaggccgagatgggcggatcgcaaggtcaggagattgagactgtcttggctaacaacggtgaaaccccgtctctactaaaaatacaaaaaaattagccaggcgtggtgcgggcgcctgtaatcccagctactcgggaggctgaggcaggagaatggcgtgaacccgggaggcggagcttgccgtgagccgagatcgcgccactgcgctccagcctgggggacagagcgagactcagtctcaaaaaaaaaaaaaaaaaaaaaaaaaaaaatggagcccttctaggtaggtcatcctccatggctcactgcagcacttccttggccctgtcccaagttccataattgcctcaattgcattggctcctgcttgatttgctttctaaaactcaggacagaggatgagttgaggagactgacttttttaacaatcgcattttgaaaagaaggaagcgtagtggtgtttcttggctccgtttccagttttgtttcttttcattttaattattgtacctggtattgtgtcctctttctgggacttttaacaactaatgttttgattgataagagctctaatagcatgggtgatttatacttcattacatcttcagttttgtcttctttactggagttgtattcaggtgtcattaagtaacgaggcattaaaaagaaacgataacttttgaaaaactgctgttatggcttatgagtgggctttgctgatattttcttgaagcacagaatttatctatctctgtaggtcctagatgataggtgagaaaaagaaacccagcttatttggcatgatattgtcccaaggcttgttagtaattgctttgaaaaatgaatagcaaggctaatggacatctgatttgtagtacatgctaagaattgcaaatgtgtgctcaaaagaaatttctctgattacaaaagtaacatatattcaacgtacaaagttgagaaaatacaaccactagctaaaaataatcaaaaccatttggcttccttgcagtctacatttttttcatgtatgttttgcttttgtttttagtgttatttaatcgtttcctgttttgtgacttgctttttacacctaacatttttagaatactctacctgtgaaattaaatattcttggagagcataatttttaatgtagcatcacaccagacactgtaatgtgtttactcttttttatggtcatttaggtggttttctttattttgtggtggtgtaatagttgttataaatgatgctgtgataaacatcctggtagataaatttgtgtttagttgatttttatataacagttattggcggaatgccttgcaaatcttatagttggtgtaataaaatatatgcgccacataattgtttatgaaaatatggaggaaaattttaatactgatttatgatcctgagtttaacataagcatggatacccctacatttagctatgatttttttattgatagagtaaaagcgcctgtaatttctacttaaggccatttaaaataattactatttaaatctatttaaacaattttaaatattgcttttccaaatttccaccttaggaagtagttaattgaatattctcagagaaataagtcctacaaaattgaccaataaaaggtcagttacgtattcattgtgtacgttttattgatcacccacagtgtgtgagcccctggaggtgggtgaaatgtgggcctccctcttacagagttgatagtgggcctgaaggggatgggatttcagctcaggaatttaaggaagacttgacaggaagtagcattgtgagccaagatttcaaggataagatttcaaggcaagaaaggagatgtattttaggtattcagacagagggtcaacaaagtctttaaggtaggaactagttcacttttcaaaaagaagaggtaattggtcatgataagagtagtagtttttaaaaatcattactgttttcattcatttataatgaatactattattttataattttaaagtttatatccaaataattgttttcaagatggtaatgaatgtatattgcttttatgtatacacatagtactttttgctttttggtaactaagtttataatttttgagggcaggaaatatttttgtttttcacttacaaagaaactatattttaataagagttttttgacagcagtgctttatgccaaaggaaaataaagcaacatttaacatatcaaagaaagccaatgcaaaacaaggattatttatttatttatttattttattcatttttgagatggagtttcactcttgttgccccggctggagtgcaatggcgtgatctcggctcactgcaacctccacttcctgggatcaagcgattctcctgcctcggcctcctgagtagctgggattactggcacccgccaccacgcccagctaattttttgtctttttagtagagatggggtttcatcatgttggccaggttggtctcaaactcctgacctcaggtgatccacccatcttggcctcccaaagtcctgggattacagacatgagccatcatgcccagccaaaacaaggattttatattcaatcaaactgacattcagatatgatcacatgaaataaatatcaacgtacaataactcagggcatattttcacattattttcctgtagaatctgctagagaacaagtttcagatacccaaaatacctagagaaaaactgatataaggatgggtaatgagcattaaggagaaacataaaaactaagactcaacgatggtaaaaagtatgataatatagtattccacagctacatgctgtgacaataaagagattctgtaactgtcaggcctctgagcccaagctaaaccatcccctgtgacctgcacgtattcgcccagatggcccgaagcaagtgaagaatcacaaaagaagtgaaaatggcctgttcctgccttaactgatgacattccaccacaaaagaagtgaaaatggccggtccttgccttaagtgatgacattatcttgtgaaattccttcttctggctcatcctggctcaaaaactcccccactgagcaccctgtgacccccacccctgccccccagagaacaaccccctttgactgcaattttcctttacctacccgaatcttacaaaatggccctaccccatctccctttcctgactctttttcggactcagcctgcctgcacccaggtgaaataaacagccttgttgtgacagtaactttaatggggaagaatgagaagaagatgtgggtaaagaaacaactgtttttctattaatggtggtagtattagtgtgtaattctgagcctggtgcataagtaatatggtgtaacataagtgaatagttgtgtgatattttaattcaatcatcccatgtatttgagaatcagaattttgatgtggtaaaagaagattcacatgtaacatataatctattaaaaagataccctgtagtcatgagtttgacttttaggtatcatttctcagtataacatattgttgtagatttcagataacattttttccccataaatactgtccgctgcaggcctaaaaataatgaaaaggcctaaaagaccaactcagtagcggtaaacaccagtactgcacctagattatggtctttaggaaccattttccagtaaaagataccagtaatctttggaaagcaggatttttttttctttttttttttttttgagatagagtctagcttcgtcgcccaggctggagtgcagtggtgcgatcttggctcactgcaacctctgcctcctgagttcaagccattctctgcctcagcctaccgagtagctgggattacaggtgcctgccaccactactggctaatttttttttgtatttttagtagagacggaatttgaccaccttggccagtctggtcttgaactcctgacctcgtgatccacccgcctcagcctcccaaagtactgagattacaggcatgagccaccacaacccggcggaaagcaggaaattttttaaaagctattttaattcagtcatgtaaaaaaaatgagcagaaagaaacaaaaaacttaaaaaaaaacttaaaaaatgagcagaatcttaggaatcacctgcgactttggttattcatgcttagccatttctataggaaattccagcactatttgagttagaccactaattatatgtgtgttgtagctttctccaagagataatggaattcacaaatcaaaactttgagattattaagtgttacaagtgaattataaccccagtcatttgctttcaaatgaacagctaaacatattttgtgttaatttcttatggatgctgctttgtttgtttgtttgtttattgagacggaatttcactcctgtcacctaggctgaagtgcaatggtgagatctcggctcactgcaacctctgcctcccgggttcaagtgattctcctgcctcagcctcccgagtagctgggattacaggcgtgcaccaccacacctagcagatttttgtatttttaatagagacagggtttcaccatgttggccaggctggtttcgaacttctgacctcaggtgatccacccaccttggtctcccaaaatgctgggattacaggcgtgagccaccattcccggcctagataggcttttagttggtttccatatacagtgtatatagggagaaacagactaagacagacactggcatccacagaagtaaaaataaaaagtaaggtataatttaaatttcacacggtcatggtcacatttttcagctttttgcacctatgttgtataaaaaagacaaaaatgcctttagaggctcaagttttcaggacttcctgaagctgtgtcatagtttaaaaatgccataaaaatgccgtcagatttaataacgtatcagctgaacactggatttctgttatgttgagtcttcaaaaatttctccctgtatgaggaattaatactgttatgtctgatctggtggtctgaaatgtgaacttttctgggccaaccagtaaacagctgctgttgctttatagctgcgtaattcagtcttggaaattattagataattcccacaccatttcagcttgctgttttaccataaatttaatgtgaacagtatttctagctaacctcaagctgtgtttattgtcgtggaattttctcttttattctgaggtaaatgattacaaatggttatgatgaggaatcaaagaagaaagtggactttcttcaaagttctttttctactctagccgcttctgagcatctttctcaagcactgtgtttccatcagtccctaccccaagcagagaaaggaaacagttttcccctttgtcttcagaaccctcttctcatcgtgtcattttccaaagcaaataaaaatcttgagatattgtcttgagtttgattttttttttttttttttgagatggagtttcactctttgttgcccaggctggagtgcaatggcacaatctcagctcaccccaacctccgcctcctgggttcaagtgattctcctgcctaagcctgccaagtagctgggattacaggcatgtgccaccatgcccagctatttttctgtttttagtagagacggggtttctccgtgttggtcaggctggtctcgagctcccgacctcaggtgatccgcgcctcggcctcccaaagtgctgggattacaggcgtgagccaccacaccctgccgagtttgatgttttttttaaccattcaagccagtaaataactttccagacagctgtagtagaaaacagaatttgtgtgtgacaaaacttaagattttgggattgagagctctatggtttatgccatgtggataattgtagccagatgaagaatatgaaatttaaggaagtgtttagagtggtacagacagctattattacgattcttggggtagaagagtagcttacatacaacataaaataatggcattaactgaattaacttcagcctttgccatgaaacccaagctttcattatgttttaaataatgaactacattaaaaatagtatataaatatgtaaaatatattagacatagacttctcataataaattatgggaacttttgatgtatttcttccctaggaaaagaactaaacaagtgcttctttgtggacttaaaatttttcagtttactattgtgaattaggtacagcatatctttataattccagataatacccataaaagcagaactgtttatttacttattatgaagggaatactgaaatgaaattaaggacaatttttttctcacgtattatatttttaaaaagttatttgatgtttgtgattaaataaagaatgaatttttaaagccagttctcaattagcactgaggaaaagaatatgctttttttcaggtacacaaataagcatcatggatataagaaacgacataaagatgaatctacagtctggattaagacgtattttaatttcagtgtcaaaggctgttaggaaatattcagattttagtacttgacaaagaaggttctcaatatttgtttcagtgttcagtgaaaggataaattctgtcgtctttctcttttatcatattagtcactgagtggtttcattaaacattccctcttccatatcccctgataaatttcaacttgttggtgatgcatcccaggagtgtctgtctttttttttttttttttttccttctcctgtcagtgagtcttaggctttggctttgaaaccctatagtgaagggaaatctcaggcaacagctgtgcaaccgtctggagagcagctagtccagattggaggagacgaacgaggctggtcgcaggagagaggcctccaggaaaaaatggcattgatgcattacctgcgttaaagattttcctgtacttagcatgcttcttagggttctactggagcgtttgggaaagatacagtattgatggatgcatagaaaatgaggcaaattttttaaatggggcaaatattaactgtagacaaagaaaagccaaaagtacaaaataacagcgttgtaagatacgaagataaaaatacgcctaagtatgagcgttctggcagactcacaatacagatgccatatatggggtaaaaccataccagtaggatggtgggaagggaaaggggtgggctcatgttccatagtgggaagacctacagcggaaaaatcaggagaatagttatttaagcacagagtttagggagtaagttgcagaagagacaactaaatgagatggccgtgaatgatttttatgacctcctcttgttatggagaaatcgatcaaggaggcctatatttgatggcaggaagaagttgagtttaaggtttccagacatttgttttaatctggaaaatttctttttttctttctttcttttttttttttttttgagacagagtctcactctgtcgcccaggctggagcgcagtggcgcagtcttggctcatcgcagcctccgcctcctgggttcacgccattctcctgtctcagcctcttgagtagctgggactacaggcgcccacaaccacgcccggctaattttttgtatttttagtggagactgggtttcatcgtgttagccaggatggtctccatctcctgatctcgtgatccgcccacctcggcctcccaaagtgccgggattacaggcgtgagccactgcgcccagcctaaaatttcttttaagcttagaagttgcaagtcaagttactgttaaaggcgtcctaactttgaattagataaagctaaactgtggtttaattgagctgagtttgttgtatgctatatctcaacttcacaagatgtttgctttttcttggctataacctaagattatacaaatataaaattacctttatgcccatttgatagactttagggctgaatttccctgtgtaagatgttgtagaggtttgtacttgtgattgtttttactctagaagcatgtttatcttcactcctttagtgacacgtgtttgttcaggaacttcaaactcaatgtgatcaaaactagactcatgttccctgaatagtctctcctgactacaaatctgttggaaacttccaatcctaattaataattgtaaactttttaatgtaagtcatatgaggggttgttgtgagcataggaggtagggagatggtagtgtgagctggagcatatggtaaaagttgtttgaaagaaagtagacccatgatgtggatcctgagggatacgtaaagaaaatgaagaggtgtagatttaaaaatgtttatggggcctgggcgtggtagctcacacctgtaatcccagcactttgggaggccgaggtgggcagatcacctgaggttaggagttggagaccagcctggccaacatagtgaaaccccgtctctactaaaagtacaaaaattagccaggcatggtgatgggcgcctgtaatcccagctactcaggaggctgaggcaggagaatcacttgaaaccgggaagcggagattgcagtgagccgagatcgcgccactgcacgccagcctggatgacaagagcgaaactccgtctcaaaaaaaattaaacaataaataaataaatatattcatggggatgttccagggaaagtagtttgtgttggtagccttgagaaataataatagaaaattagaatagaactaagttggttcattaaagttggaacacttgtagagatttttgatttggacagacattaattcatttgattatttctcttattcgatgtccagaaaaatatctgtacattcaatgtggttttatttgtactgcacatgtcattaataggctaaagttacctctaagatacctgctttcttagtccttgttacgctgtaaattctgggcatcaggatatagctttttattatgttagctcttttaatagatgatacaattggattggggaaaaaactgattatactctggagtaatactttcatagcctgtagtatcctgcaaatagctcctggtcatcttcgaattttactagcaaacttgtagggtaataggttgggacaaagtattataatcagtggctttgagggcctgataagaggaaacaataattgtgcagctatattgtgaataagtagtgcatgatgctgatggttaaccctttcctgcggtgctcaaacattgggaaataattgctttttgttcaaaatgtaagctcttcgataattgagacttttgtcaattcactgaaatattcccagagcttgaacatgtctggtacatagtacatatttaataaatatatagatttaatgaatgaattgaggatgtagccaaatattggaaaaggaaagggaaaagaaagaatagcccaaacattagaaagacagaagatgtggagcagcaatttcacatgcctaaaagaatttctgagattatggcaaaatcatttactttacttactccttattgatcaacaaaggaagagcaggttttatgtaacaaccaagaagtaacatagggatctcagaagagaagaaaccaagtgtctttggatcttaataaaaagaacattcaactccagaaatagggttaaacctatcctacacatgtctagtaaaaagtcagtgtatcagaggcatctgtgtttagagataaaacataccattagattcatttataatagtttcattgtccttagtttttaaggctaatgataaagatttttttttttttgtgagacacagtctctctgtcacccaggctggagtgcagtgacgcaatctctgctcactgcaacctccgcctcccgggttcaagcgattctcttgcctcagccacccaagtagctaggactacaggcacacgccatcatgcctggctaatttttgtatttttagtagagagggggtttcaccatgttgcccacgatggtctcgatctcctgacctcaacagatctgcccgcctcggcctagtgctggaattacaggcgtgagccaccacgcctggccttaagaattaattttcacagaaatctgcttctaaatattattcagtgataatagattttagaaatttcagattcttatgttgtaccttaaaggttaggatactatttataaatgctaaacatgaactcctgtcatcctattttaatgtctttattaagtgattacatgaatgtggcgtttcagtaggtgtttggtgtattaatagatgtaggtactcccctcttaaacctttaagtattttcatgccatgaaaaatttggggggcattctctttatttattgattaggtacctgtattttcaagaatattactcagcttcagttcccccaaatcttttttagtgttaactaccttccgagaacgtggtataacattttaaaatatattttttgaaggtttggatgtcactgaagatccccctatttattggatggtatctttatcagctgggaagataattagtttcccaatgttgctatatttttatgaataggtcctgtagctcttgctttcttgaaagcttagaattgattgtaagccatggactaatgatattctccaagcatatttaacatgaataggctcatgttcagtatgtcaagaagttaccctgttgtactatttaaataatttgagcttagttttctttttccacctttgttctaaattcttaggtgagtctgaattcctgggcatctgtgcacacagcttcttcagtaggtcctttactctcattgtatctgatctttgacttcataaagacccttggcctactgaccctgtatttaatttcacatctcaatagtatttagccttctcatatttttcctcttctttagagctccctgatccctcactccagtcattcaactctgtgtattcctttaacttccaccctcgctctgtctcttcacagatatgcttctttatatggtagtcagaagttcctgtgtgatcttcgtaacctccagttccctccacagtcacctgttatcaggcatctgttccttgagctccagggaatgagctctttgctatcattctggttgtcggactcactgggcactgttgtgtcctccacagtctctcagtggcatcggttgatgggtgcattctccccacactgatgtcattctgctgcttctgattttctttctgctgtcctccattttcctttcaggctcccttccccgtcctccccgcgccaccttttgcaatatttaggattcagaaattccaaatattgcaaaatatttagaatcagaattcagaaattctaaatatcagtgtttaataggagtaccctggggttgtccattttctcacacaacacatacttgctaggagatctcataagtgcagtggtttttcagaggcctgcattgatgattcctgagtcattatgtccaggccaggcctcatacatactatttactggttctctttctgcgggtgctccaccaagaattcagactcaatggaatatttcttctaagatgtacaccagttccttatcaaaaaatggcaaattcagacttcttaggttaaacagagaactcgtgaacatggcatatgtctgttattccatttttctctgttggcttattgctgagtaccatttgggataaaaatctgtttcaggcaaaggataggattgttttcagcttttattaaattctcctagacccttgattttatgcagagaactaattaaatttgaatgaatttaatgtagaaaccctgctattgatgcagaaatcaacctgattctggactagcaccagaatcaactatttttgttgtttttgctttctttttttttgcttttgctttctctgccggtaaataacaactagtatgtaagaatcaaatgaatcaagcataaatccctaggaaatatttatgcattcatttttaacaatttaaagatgtgaagatatataattaagcataatcctctcaaagtttgacgttgaaaagtatttcagatacttcaacttaaatatattttttgcaaaatatcttttttaaaaaaacagatgtggtctcagcaatgtaattattacagtgtgaggagagcttacagttgtaccaaaatttataactaggaagaagagaatgtgaaataatccggaaacctacaaaactgtcctatacaggaataccaattaaacagctactaaaaatgagtgtaaaatgacaatatggctttatcaagtgcttagggtctggaaaaatgcacatattgcctgttatttattgttatacttaatgaatgttcttttgcacgtgagaactgttataaaagatgtcttttgtacatacttggtacaccagttggctttttaacccattagctgttttcccccaaaggtggcctactctagatgacgttaaaaatacacattttccagggacttatataaatagtcaactgccctattatggaaacttaaaagcgaaggccctgaaatatccagacagtttgaacataaaccaaaaatgaagtgaatctctagaattgctgtgtaatagcgtgagtggggagggggtccctcaagagagggaactgacctttttcttcctcgtgggtgaccttgagtacacactttatttagtcattaaaagggtcacctgaagcttagagaatgaagatcctacagcctgttaattttatcattgttagaaactctctgcctttggcctgaaaatggtaaatcacctttcttagaagattctcatatccagatattcttaccaaatcagaatcttttccagcattttcttcaaaaaaccacagttctgggttaaaacacagcagatcctaactgtaattttcctttcatgtacattttagtcatctttataattttaaatgaaagacaggaactacattatttgaaataagggttaaccccctctaattataagcattaatcacacacagttttctcatttctaaatgttaaatataaaatgggagctatctcttcagacacttttctgttgccttctgtgtgcggcaggaccttacttttaagcttagtttgatttaaaggctgagtttctgcttgcttggaatgcttgctcttcaaaatatttgctccctggagagggaaactgaagatggagctttcacgtgactttggattgctgacctggaagacgtttggggtaataggatgggctagggcatggttccactgctttctgtttgagtggggtcaggaaaggaaggcggggctcgctgtgtgcaaacaggaaaacatagtctgaagatgtttgaagcctgagtgcactttcatttgatgccttgctttattgcttaagagaattttaaactgccgaatccgcaaatgtgctgcagcctataatgacacatatttaaatgatttttgcatctaaacaaatgcattcactctttgcctggtgtgtacaatttgaatgacactcgtgctctgcctggaaggaacagacgtttttcattataaaattcagtcaagcagaaaagtagcaaaggaagcagaaatttccatttacatctatgattgaagttgtagtgataaaagaggatgactaagttgaagagtagccttgttctcattctgctatctgacatgggatcttgtcactttggtaatagtttttaaacttacattattgaggaaggctctgatcagaagtctcaaattatacatgttcttcaaccttagatttttctgggtgttttgtttcaaaagtctcaaattatatatgttcttcaaccttagatttttctgggtgttttgtttggttttttggttatctatagatagatttgagtatctctttttttcttaaaatccgttacttactagtaataaagacttaagtggtagctttacgctccattatcacagagattcacagtactttttagtttttacttgtgagcctcagcaggtgtagacagataccttagttgccactgataacatccagttgccactagatcaagaaatggttcaaaattctccaggggcattttctgctaaagaagagttggtgatcttccttttggaagccttaatgtacttaaaccttcttccttagaagtccagaaattcaattatttcagctctctgtggagtgataagtcctgccaaattgatttacaataatgaaactaagccttgtttacaaatctaagtggtgatttctaagtccacagaggcgtggtaacagagagagagattctgatttatctgggggtctatccgtgtttgaacagattgtgtgatttttgaaacatgattcaaaagggatgttgataaattctaaaatacatttttattgaagagcttgatgaatcatgtatacttactttatttgttattctattagatattgtcttcctcatccctaggtggtgttgctagtacagtgacagaattcaaatccttctttttcctctgctctaacagagctttgtgaactcatagcaatattgtaatgcctggtaaaaggtggtgccagtttcaagtactatatcctaattacttcatggctaactcttgttattgttaacaatattgttaactcttttgttaaatgcagtgacatcttttttctttctcattctctgtgtactttttgccctaaatagttctgcatcttttaagatacaagtttgctttttcttggaggtttttatttggaaaatgcctgaaatatatagaccaacatttgttcctccaatggttaaattacattgtctcccaaagtgaggcattttaagtctggactatacccaggagaatctaaaagaggcagttaataagctcttgaagagcacagtggggtggttgtgtatttattgagtctcacacttaggagagaaataggctggaccaaatgagcctgggcatcaaaagcatgtgggtggtcgttggtgatatgtgcagtgatgagtgtgtgtgctgagggtcctagaccaggctggcagggaaatgaactgaaggcagtgaagcctcccctgataactgcagagagtgctgcagcatccaggacctcaggatcatgatgaacaagctgtagtggatggaagggagaggaactatgggaaggatgagtttctggccagaaagtggtttactggagtgctgtgtctgagtattacatgatctgaggaccatgaggtccagctttgggagtatggagagtttgagtggagtagagttatagtcccatggtcttctgattcacagacattcatgagcgataagtatctattgagaaagtggaagcatgatttttatgacctcctcttgttgtggggaaatcgatcaacggggcctatattggttgggttctacaaccaaatagaatgtgttcagcaggagtcatgttttgggctcctcacaatgttcagtgttagttctgttcctttctcttgcttccacataggaaagactttgacccaatgaggaattagtcattgtcctttgggtacacttccggaatttgataatcagttgggcacttgattctagtacatttgctaaaagtaattaataccctgcaattggaagcatgcagcaagcgactgggaatgctaagtgaaaggtcagaattgaaagagtggaggaggctgttgacccttaggcatggatgatatgtctgagtgagaaagcaagaagagtagaagacagagccttactttataatcagaattatgaaaagaggagccaatgagagggaaagaatgattggcttgagatagattggtggaaactggagaagattgaatttaaagaagaaaagtgggccaagttcagtggcccatgcctagaatcccagcaaattgggaggctgaagctaggagagttgcttgaggccaggagtttgagatcagcttgggcaacgtggcgagacccctgtctctacaaaaaataattaaaaaaaaaattagccaggcatgttggcatgtgccggtagtcccggctacttggaaggctgagacaggaaggttgtctgagcccaggaggctgcagtgagctatgatcacagcactgcactccagcctggttgacagagggtatccccgtctctttaaaaaaaaaaaaaaaaagagaatgtggcagagtagtcagagaactggagggctgagaagagactgatggcatttgttgttcttgaccttgaaagaagagttgcagattgttggagcaaggccagatggtaataggttggaaagaacaagtgaggggcgtgagagtgacagtctacaaccccgttaagaagttatctgtgaaaatgcctcttcctgtcttgattatagcctccctcgcacatggctttctgagtatggtatgtgaaaacagcatgctgtatatttttaccttcccatatgagttaaggttttggtaatgacttgtggttcttttgcctcacggaacaccaacctggttggtattttgtcggcaattatgtggtttttaaaaagccccgtatataaccttaattaattgcgtctctaaaatctatcaggctttgagttttttgttttttttttttaaataaggcagaaagaaaggaaagtgttaggagaaagcaaccagtgagaatacctatattttgaagaaacaaagtagggaatttagaattatctctactatatctgctttttcagctcatctctcgggatacagaggactgaactaagctaaagtaggttcaagtctaaaggaaaccttaaattaatttctgtattagaattaatcacacacctataaatacaatttatgatatgagaactgcaacaagagaaatggggggagatgagcagtttgctgatcaatagggttaatgatggtaacatagaatcctagtgatatgcctcccattgactaaaatgtatgcgttaagatagcatagcgcataaaatggtgtactgcagtctcagtgtattcaagcttattatggtttctctgcctaggtttgtgtctttggctttagattttctcccataaccccaacctgtccacattcaagtcactactccttgaaatatattattgatctctaaaatctgatgctaagtctgtcttgcccaacggtggccactagccacccatggccattgaatatttgaaacctggctagtccaaactatgctgtgagtataaaaaacccaccagatattaaaaagttagtctgggagaaaaaaacaaatgtagaatgtcttaatgataattatttacattgattgcatgttgaaatgatgaaatttaggatgtactgggttaaaatatattaataaaattaattttacctgtttctttttacctttttatgttaatgtggctacaggaaattttaaattagatatgtggcctctattatatttctgtgagacaaagctgctccaagctgttttggtccagaactatatctcggttcttttgtatcctacatggacctgcatagaatggtatttagtaatactcagcagtagcagagatgatctcttatcaaattatgttaagttttaatttttattcttgtctctcaccctatgtgcacctctctggccaggaggcatttatcatatcaccttttaatatttggaaatcacttgatctgcttgagtcattgtgttgttttcaaatctagaactctttctaccttattttgtaacttctataattaaacaaaaggcgaaccaggagcagcttggctcttagggatgtgtgaaaaggcgctcagtccttaagttggtgccaaaagtgacaaatctataggatgagatgcaggtttatggaagagaagcatgaaaatttttattttttaaaaggacacagcaagctagtcaccaaaagacagatacttgattctacttatatgcggtacctttttgaatttgaagagtcaaattcaaaaagatggaaaacagaatggtggtttccaggttctggaggtgggggaatggggagtggaggtgggggaatggggagtggaggtgggggaatggggagttgtttaatggtgtgcagggttttagtttagcaagatgaaaacagttctggagatggaaggtagtgatggttgtacaacgatatgaatctacttaacactaaactgtataattaaaagtgggtaagcaaagagtgtcttacaaagcaataacttgtaacttaaaatttttaaaaaccttaatgagattagttgtaatgggttatcttaagtagacccttactgccggaaggaacagctgaatcacatcacttgggagcttgttagaaaagcagactcagtcccaccctagacttgtccaatcaaaacctgcattttaacaaggcccccaggtgattcataggcactgtaaagcttgagaagccctgctccaaatatcatttctcaaagtgtgatccatgagccacctgaagcagagccaccctgggaaggtctgttttcaggcgcgtcccagaacacgtaaatcagatctaggctgtggagctagggagaagatgaatctgcagactgatcaggatcccaggtgattttgaagcatggtttgagtttgaaaacccctaatctggaaagctttaacaactattactcttacaattccatcttttaacgaatgttggaattattaaatacttgtaacaagaagtcctgttattgataaaatcaagatatgactaatagtgcagtcaaaaagaggcaacaaaaaagcacctataacttatcttgggttggttaatgaggaagctgtcattcaaaattagtaagactactgtaacatttcttggggtcctgaacattggaatgagagtcggttttcagagttgagcccacctctgtcattagctttgtgcaaacctcatcaggctcaagattcctcatttgtaaaggggaatgaattctctgaccagttagtttacattcctaagacaaggttaaatttggaaagcaaagaattttcggtatatatgtgataattttgaaattcttgaatttttaaaaaatttaaatgccacattacttatatttttttctaaaaaaaagtcaaaccaagcgctgtctagttattaatagataccacagatgagatgcctgagttggtaagctctttttaattctagttcttttcaactacaataattttatagacttttttttgaaggctagaatgttgatgtggaatcaaataggtatgcctctatgtatggtagatgcacctgacagggatcacttgacttgaacatgccctgacaatgatcctgtgtggcaggtgcacctgattctgagttctgagttaagaaatccgggagtgggccgggcggggtggccggtgcctgtaatcccagcactttgggaggccgaggcaggtggatcatttgaggtcggaagtccaagaccagcctggccaatgtggcaaaaccccgtctctactaaaaatacaaaaaccagctgggcgtggtggcgcaggcctgtagtcccagctactttggaggctgaggcaggagaattgcttgaacccgggaggtggaggttgcagtgagccaagatcacgccagtgcactccagcctgggcgacagaatgagactctgtttcaaacaacagcaacaacaaaacccaaaacaaaaaaacaacaacaaagaaatccaggagtggctaacccagagagccattccttatctgtaaggaacatctgagccctcatctccttctgtggaacatgggcctcgccggggattgagaccctttgttatgagttaagtggaagttgccaggtggagattgttagggggagggtgttaaatgagaatgctgtagagaccacatgccttttgcaagcggctgcggttcctctgtccaacccaccaccactggactctctaccctgtatgcaagcccccagtaaaaccctatgagacatacggttcactagctctgggcctcttctggctcttgaacctggtgccatccacattgcagtcagtaggagtttggcatgacaccttattatgtgaacttttatatcaagccattaaatttttttaaaatagactttatattttacaacagttttaaatttacaggaaaattgagaggatagtccagagagttcccataggctttgcatccagttttccctattgttaacatcttatattaatatggtacatttgttgcagtcagtaaaccaattttgatacatggttattaactaaagtctatactttattcagatgtccttagtttttgtctaatgtcctttctgtgttccaggatgccatccaggaaggcgcattatatttaattgtcaggtctccatagcctcctttcctcttggctatgacagtttctttatacttctctagttttttaataaccttaaaggttttgtattggtcagataatttgtaggattcccctctgtgggaattttctcatgctttgcctggggttattggttttaagaaggaagaccacagaggtaaaatgcccatttcatcacatcatatcaagggtacgtgtttatcaacatgatacagccctgttggcattgaccttgatcacctggctcaggtggtggttgttgagtttctccacttgaaaattactcttcttcccactttatgtgctctactctttggaaggaagtcagtttgcacagcccacaattaaggagcagagaattatgcttcattttcttgagggcagagtatctacataaattatttggaattcttctgcgcaggagatttgtctcttttttcctatttatgtattcattcattcagtcatttagactcatggatatttacattgtactttgatttctaatccagcactacttcataatttttattgctcaaattattccggctttagctattagaagccctttcacttggttcctatgctcatttgacatagcctcttttttttttttcttacaagatgctgcagtctcatcttgcatattttcagccctaatcctagaatcagctgttcctccaaggagcccttgttccttttattggagagtaatgttattggagaatagtattaaaatctggatgttaaggatgctcgttgccactggagtttctttgcttttaagacttctcagttgatagagcaaggcaatgtatttgtccatgttcacccttatgttatgcagatctataaatatttctatagctaactagttgtatttatattaagctataatatctagtctatattaagctaaatacaagttcatccggatgtttcctactctaacgtattaccacatggacactatatctctcctccttggttatgtataaattctcactccatccaccatctatgtacttaattgttcagtttcagtatatgtgcgtagccgtatcagaattgttaacccaggctgggtacagtggctcatgcctgtaatcccaatactttgggaggctgaggcaggtggattgcttgagcccaggaatttgagaccagcctgggcaacatggcataaccccatgtctactaaaaatacaaaaaaattgctggtcatggtagcatgtgcctgtagtcccagctacccgagaagctgaggtgggaggatcacctgagcccaggaagtcaaggctgcagtgagctgtgatcgtgccattgcactccagcctgggagacagagtaagactctttcttaaaaaaataaaaaataaaaaatataaaaaaatttgttaacccacacctatatggatctttttaaaagctgcaagactgctaacaaatatttatttatttatttatttatttatttatttgagacagagtctccctctgtcacccaggctggagtgcaatgacacaatctcagcccactgcaacctctgcttccccggctcaggcgattctcctgccccagcctcccgagtagctaagattacaggcacccgccaccatgcccagctaattttgtatttttagtagagacggggtttcaccatgttagccaggctggtctcgaactcctgacctcaggtgatccacttgcctcggcctcccaaattgctgggattataggtgtgagccaccatgcctggccataaatacttattttgttcccgtggttttttttttcttttctcttttttaaagtaaatcctttgcactatttttattattttaagaccagtgttattcagagcctgggttaaacactattctgtgtgtgtgtgtgtgtgtgtgtgtgtgtttgtttgtttgtttgttttttgagacagagtctcgctctgtcacccatgctggagtgcagtggtgtgatcttggctcactgcaacctccgcctccctggttcgggagattcttcggcctcagcctcccgagtagctgggactataggtgcgcgccaacatgctcagctaatttttgtatttttagtagagacggagtgtcaccatattggccaggctggtttcaaactcctgaccttgtgatccacctcggcctcccaaagtgctgggattacaggcatgagccaccactcccggccagcactattctgtcttatactcactctgccatctgtgtgtgtatatggtacgtatgtgaggctggatctgtgcacttggaaaagttggagagatgatttaggtaaaacttttagttttcacttcttttgcctttttgcttatcttgatccatttagttcctaccatctggcaaatagttctcatctgaagaatcccatctgtcagttctcactattatccggtaatagttacagtgaaatgctggtgacggcaacagccactttttaaaaggatgtgtaattcaccctcatgtcctctttgagaacccagtaactgcccacactctgaagctaaaaccataacagttttatcacatggaaagtttgttgagaaatgtttggctgtttctgtgaagtaatcgtcccgtctcttgagtacagatgcctcccaggaaaattttcccagcctatttgttaatgtgaaagttacaaaagatagcatataatgagcacattcaagacaaaaaaatttgtggagtaagagtctgaaatggtaaaataaaaaatcacttaagaaaacatttatctgtagctgtcattttcatatacacatatctagtgtatacaagttagtaagtacataattctcaaaagttctacctgtctacacatctacacagaaaaattaggaaagtcttgtccagacttttccatcatcttcagtataaagcatcttctagctgttggaatagaaacaagctagattcttgactcctttctatttgattatttagatctgaccttcagacgacatccagaatctgagaacacgcaccacctctactgctctcatcctggtccaagtcattgtcatctcccacctggattaatgccagagcccccttcctggtcttctcacttctagtcttgaccccctagggcaagaataattagcttagaaaaccaccccagagccttccagcattactctgagtactggccagagttggacaatgtttaaggccccgtgcagtcagctgtccctgtcctgtcctggctgtcactcactcgcttgcccactgatctcttccacatcattcctccacgacagcactgatctccttgttcttctgtgagttcaccaggcatgcatctgcctcaagactttgtgtaatacttgttgcttcctctggctagaatattcttccctttgattctgaatactttgttccctcacttcctcaagtcttcactgaaatgtcatattttcaagtaggcattccctgaccaccctatttaaaatttcacccctcagaaaaaacaaacaaaccacccctttctctgctttatctatgtaacatttattaccatccaacagacactgtatttttatctgtattttttatcgcttccccgctaggatcatatatcgttttatctgttttgttcactgctgtattcttagcactgagacataattgtaagtatgcagtgaagagttagtggataaaggacagtggctgcaagaggggatttaggaaacaccccctcccagccaggaccagcactcggtgcaagagttgaaagagttgatcactcagattctctgcttctccagtcgtagggactccaccccgctgtgttgattgctgtcatgtattcaccccatcataagcagtactcacatgtaaaacagtaccatgtcatctctgtggggctacaagtaggtggtgatggtgcaatgaacatataaaaccccagtgtcttcagtaggtgcgaaataggtgattagtgaatgatgaagagtagctgttgctgttttgattactatgattattattatgagaaactactgtggttgatgagatagatactggggagaaggatactattaatataatttattgagcaactttgttctgggcactagttgagtactttagggatattaattcatttaattctcccagttctgccatttactctctatgtgacctggactgttacatagtctctcagtctcaccctctctttttttttttttttttttttttttttttttttgagacggagtctcgctctttcgctcagtctggactgcagtggtgctatcttggctcactgcaacctccacctcccaggttcaagcgattctcctgcctcagcctactgagtagctgggattacaggcatgcaccaccacgcctggctaatttttttgtatttttagtagagacggggtttcaccatattagccagactggtctcgaactcctgaccttgtgatccacccgtctcggcctcccaaagtgctgggattacagacttgagccactgtgcccggcccttgccttctcttataaagtgaaatcattgtagctgctttggtgtggttctgaggacggtgagagaagacgcacgtgaagtattgagggtggtggcaggcacacagttcagagttactaacaatactggtgttttatcttcacaaggcagatctgggcccatagcacaaggaaaccgaggctttggcattttacagtaattacattgccagaacatttcccccactttcttgaatcatctttacctcttgagagatgaggaagagagggcacacctcgggcagaagtccaaagacctcaggcatttttggcctttcattcccatgattctggccaacatcattttagtccccagcagttcatagaaatattgtcttttaatctgatattcaaataatctgtgccttgaagaacctgtgtatggctctagaatcttttacattaatctactcaaccccactctgatgctcaaaacttcagcagtctgttttttttttattttaatgtctttattattatttttttttttgagacggagtctcgctctgtcgcccaggctggagtgcagtggcgcgatctcggctcactgcaagctccgcctcccgggttcacgccattctcctgcctcagcctcccgagtagctgggactacaggcgcccgctaccacgcccggctaattttttgtatttttagtagagacggggtttcaccgtgttagccaggatggtctcgatctcctgaccttgtgatccgcccgcctcggcctcccaaagtgctgggattacaggcgtgagccaccgcgcccggcctaatgtctttattttaaacatttatttttagaggtagggtctctctaagttatgcaggctggcctcaaattcctgggctcaagtgatcctcccaccacagcctcccaagtagctgggatgacacccccaggtgccgccatcctggcagcagagtcagttttgatacatctttcccttctcattcttcccaatgtcatggattgggaagttactgtggttttagttgcagtactttttactctgaattctgtttgcttcctggaattctgtctgtcttttgaaaagacaacataaagaaatcgaaaaatatactttaaattccatagtgtgggagcctctgctactcgcctgtttgatattcattcccattttttcctttctaaaagaattccagattttttttgttcagggtgacaatgtgctctgctgaaaatactttcacagattcccttgcaggtgcatgtgaccagatcacagtaatggcacatatggcctcagtggaatttgctgaggagtatgtccctcccaagtaacagcaaagctttattagaggaaaaaacaacaacagaaaacctttcacctttgtcttgtttctcctgccttctgtctggaacttggacacagagtcttgaatttctgtgaccataaaacacgaggataaaaccaacgtgctcaggatggcagtacagaaagataggaatacgctggtccctgatggcatcatggaatatctgcagtggccctagcttcagtgtcacttcttaggtgagatacataatcctaccgtgtgtttaagccacggtttgacatgtggtctattctctgccgctgactgcattcccagctgttctatatggcttgctagctaatttaagtctagttttattgtcaaattgaccacattgtagattataatattaaagtacttcacagtctaaaagtgaactacttttgtaaaagccaaaggaaatgggccaaatgaaccattttgaacagagtttaaatgagtgagttgagttaccactcttggatggagaactggagacctggattttcagtctagttcttctgccagttggctctgtgggcaagtcacttgacctgagctcttttcctcccatctgcaaaatgaggtaatttgagctagacagtcctcccaaagaccaccaaagagctagcagattgaggcctgcagactcctattgaatttgccatccttgttcaccttgccaagacttcatagccaagaagccagacccagattttgttcattagctttgaaaacaccctttcagttgggtgtgtgtgtgtgtgtgtgtgtgtgtggtgtgtgacatgcgttttgaatataaattgtgaattgttttagcaagaaaccaggttgtatgtttctcaataaacatgcatactgtatattgatgaatttatccacttgaaataaatggtgccaaattgcctaaagtttgctgtaaacaggaacatgatttctcattatgatgtttaatttgttttagtctttgatctcttacatcagaattctgttaagaactctttttacctgaaagatcaaagcaaataagcagaagcatttataaaaataaggtatacgtggctgtggagagaaactccaggtatatacgatcataggctttttaaaattaataaactttgtttttaaaaacaaagcagtggaagttcacagcaagtttgagtagaaagtacagtttccatgtaactgctgtcctagcaaagatttttaagtacaatattttttaattaaaaagagaaaatataaaccgtgctaagccagttggtgaaaaaggcttcattatacttttagcactcttaacgcttattaaaagtttttaaaaacagatttttgtggttgaatcgcttacaatttctgatgtgtaaccttctaacatgtttcatcaaattttaaaagtaatgtaagcagtgctgtccactgctaaattttattttaatgttagaatacaatgaggtttctattttgccattagtcctgagagcttattaagtaaccagttttaatcctttaaaaaaccattctcattttgagggacacatatttcttagctttgtgcaatataagaagctaagaccatcttggcagtatcaaatgaaatgttttgcaagttagaaagttcagtaaccacttataaacataatgaacaattgttatagtcagtctaatgcagaaatacaggtgttgggggcaggggggtggtgggtgggcagacttggtccacaagtagtagtttgccaacctctgtcctaaacacaagttcaagaatatggttctcttggatagattttctgccagatgaaagtaagagtaacatccttagctaatgaactcctaatatccaaggcaacttttaattaattcaggcttttaagaaaagcttgtttaccaactcctcattaaaaatgttcagactggctggtcgtggtggctcatgtctgtaatcccggcactttgggaggctgaggcaggcagattgcttgagcctaggagttcgagaccagcctgggcaacatatctagaccctgtctctgcaaaaagtgaaataattagctgggcatgatggtgcacagctgtagtcccagctactcaggaggctgaggtgggaggattgcatgacccccggaggtcgaagctgcagtgagccattgatccaaccactacattccagccagggtgacagagtgagaccttgtctgaaaacaaacaaacaaaaagattaatgcagtacatgtccttttggtgaataagtaaatatgttttggtaactttagctttgcattataatctagtcgtcagcagattgactaagggcagataaaacaagatgatttggttttgtggtttggcacttactgtctgatttatgcccccaagaactcttgcaggccaaggtcgagtgtatctgatacctgctctggctcttctcacgaactgatttagtagctttgggccagcattagattttttaaactctttgacctatttgtacatgacaggcatttaatctttccagtagttacttgtcaaatagaaaagcatcacttcttagtttggacatttgcaaatatgactgagcagagctgacagatgaggtgggcatcttcaggccatagggtacttctggcctcctgtaacctagaaaattgggatgcctcagatatcaggtattcttccaagcagctagggttagtccctgacctcagaaaccctgagagccctcagaaaccctgagaaatccacctgggaatggtgtatttgttttggatgagattacctttactttccattctccaggtcttcttgtgttttttgtttttgttttgttttgttttgttttatatcattctatgtaaaagagaaatgtggtatcatttgcattatcatgttatttctttccttataatttatatcttaatgcttatctctggggctaggttataatctcctgagttaggtagccttaggtttcttggcggagattcctcccctgggaagtgaggtttataaaagaacccgtgatgtggccctgtggagctgcatggggtgtgtgctcagtactcactggtttcttccctgcaaagtgacacctgcagcctttggggtaccatgtctcataatttttgcattccctgcaacacacactatactgctatgggcatcattgatcattttaaagatttaaggaatgacaagatacagtgcttattctcccctatgatttgcttagatttttatctaaatagtacttattgaaataagtacttcagtatcatgctacatcttacatgtttgagctagaaacagactaaagtttaaacccttttatgagaatgaaaagttacttccttccccttcttagggcttttaatccctctttatgttgcatttcagaaaatgccctatagcgtactatgaaagaaagacattcattcctgtctttgctgctgtgtggacgatctgtattccttgctccgtgggagttgtgggtttatgtctattcttgcatgttttgcctgaaggaccacagtgacctacttggtggtctccctgctttcatggtttcactatgctgatctatccttcacttaattatagagtctatcttaaaaaaaaaaaaaaaaaaaaaaaaacttttggcctatgttgcttcttccaaaatggcatccaaaacctaagcctctttaaaattggagtccagcatgcttccccagtgctacttccttctggactccctttgccacttgctttctgcttccacccatatccagatgggctgcaaatatgccttgctggttctttactctgtctttgcacaggaggctccctcattttgaagggtcttttgctacccatccatccatccatttggattctataatagagttcttgatgtttgacagaactaggccaggaattgtgggggtataatggcaagcaagacagagtctatccttacgttatggaagttcaattcatttcccatgtggcatactacttctcaccattcagattcatctcgaatattgtttcttctttgaggtttttcccactgcacccaagatactggcctgacactttccttatctctattacagaatttaacttgttcattcattaacagatatttattgcctactatgtgcaagaatctgtgctaaaagctgggaatattgcagtaaacaaaaattaagtttacagcttacatataatgtggtaattatccatcttttaccttcattagactgagttcatgtaggactttatgtaatatctttatatcttcaataccagaaatgcctagaaataatttgcataatatacattttctttaaagatttaacaaaagtctgagggacagttttcagaataaactgaattaaactctctctctcttatgtgtgttatgtaaacatatatataaaatacacttttgggttttttgcttaggaagtagaaaaatgctaaaatttctgttacttacaagcagattaaaatgtccaagaaagaaaagtagggatttatattgattctgctcaaatgcttacctagacaatgtcaatatttatattttactcccctgttgtagtagaatggtaattggttctctagttaagcagcttttttaggattaattttgaagcaagaaattcagattaattaagggacaatttcacttgcagcatttaggcattattttaaccatcaaacttgaagtggcaagaaacggagttgcttaaggaggccagacgtaacattctaaaggtagtagggtcttgattgggttgcttaggcattaaaaggctgtttaacttgtcttgaagtctatctttccttgatgtcttctgcggtaagaacactgtgatacagatggaatgacgggaagtggttttcctttctttcagttggtgagtttgtaagtgatgcccttctcgttcctgacaagtgcaaattcttacaccaggagaggatggatgtttgcgaaactcatcttcactggcacaccgtcgccaaagaggtaccagcccataaattctttcttattgcaaagtgaagatttcctggggacgtgcttaatggcattttaggggtattttgaggcaacagctatgttgataagttatttaagaaaaaaacccagtgctactatccgtaacccagattttagtttttagagtgattttaggttcacagcaaaatcgaacagaaaatagagttcccgtgtaccccctgtccccacacatgcgcagcctccccatccatgaatatttttaaaaagtcaaaaatagggccagttgaactagattcattatgtgcctgtgccgtgtttcgcaacttaaaaatataagttgtctgtgccatgccttataacttaaaaatataatctctaatagttataactttaaagtttacccttcagattatttttatgcacctgttgttttcttttgtcatatacaattttttaataatttagccttttcccctgttatctattagtgaatacagtggtagaacagtgaagtagcttttttataccagcctgaaagctccagttagaattcagtttctcagttataccatccagttttatattcagcaggccatgcctaccatcttgatttttccacagggtgagtctgaccgagcacttggttaacctctgcttttggctaagccaataaaagatgtaagatacttagcatgaaaaggtcactgtgtggtaagaccaccttcacagctgctgtgtccccttgataggtttcctaataaatttatataggtttatttgtggcaagatcagtcttaggctaactagaattaggctcctttatctagctcatagtgcttcacttgagtcaattttgatcccctgtccctcaccggaacatgtctggagacattttttgttattacagcttgagggagtggtgttactggcatctgatagtgcccagaggccagagattctgctaaacatcctacagtcaacaggataaccacccgccacccccaagaattaggcagtccaaaacatcaatagtgctggggttgagaaatctgatctagcttagcttaaccattgtatcatagctttatagctgttagacagaaaataccactgaagatttagtattattttatgcctcttataaaatagtatatttggatccactgtagaataaaatgttttttatgtaaaaatgtgttttggaggtttaagagcttgctgagtttaagaaaacaaaccaaataatttgaagtccagctacctatttgataacctcattttttattccttctgtgttttcaaaagaaaaatcctttgtctctaagaaacggaaatgactcccataaggtcaaaatacagtctgtaatattttcattgtctacctttatgtcttgaattattcatccttcatttatcactagtggatgctctcagaactttatgctaatctagatttgtgcaaatttagcaaatcccagaaaagcaaaaagacattcaaggagaaatctctaatgactgtaagttctgattcttagtggctgcaggggataatttcttctcttcccaggattgttactctgaaagtgaaccaagagagtcagaatttctaggataaggcaggtccatgtgagataaacttccatctgtaagggaggtaggagtgagctggggatctacctggaatgcgcacaatttctggatacacgaattaagccagaaggcattaattctctggtatctgttcaccagtggagactgctacatcttatttcccaattagtttccattccagttgttcgtataaacctctattatataacatcgtggtcttattaaataaataataaacaagaataaaaagagtaccaaagtgtaacccatgctaaaaaaaatcctgttgtaaattcactcaaaaagcaaataatcttttcctttgtgaaattggttcctaatatattgggtctgcatgttgattattttatgtggagttttcttacaatgaaacacatctactctaccactcactgttttctccttacactttgtagacatgcagtgagaagagtaccaacttgcatgactacggcatgttgctgccctgcggaattgacaagttccgaggggtagagtttgtgtgttgcccactggctgaagaaagtgacaatgtggattctgctgatgcggaggaggatgactcggatgtctggtggggcggagcagacacagactatgcagatgggaggtaaggtggcctttgtgttcagcctcagagatgctgaaacatcttgtatggagtatttgtatcctgtaaattaatctttctgtttatcactgaaaaggtctctgcccactcccatcagagtctgctgttatgcaaaaatctgaactatgaatttttatggcatcctgttgaattaataatatcagtcacccatcacagagttaattttaactatttaatattaaacttgggatcaaaatcccactgataactatcataggttactggtagttctaacagggagttgaaataataatggcgttctgttttggtcattaatttaaaaatatttttaaatgctctctgggattgtcagtcattagtttaaggtgaattttcgttaaaggtttggtttgagattttgggcgttctctgtgtggatgtgtaagggtttttttttggccttttatcatttcttttccttcatagtggaagtcaaaggcattaataaatgcttgttaattttttttaactacctttgatttgttgattgtaaagaaacctattttcgcctctttttcttagggagcttagtcccgttacttcttacctgattctcattcttaactgaaggcaaacatctatattcaaatcataaaattataaaatgagaatctttgggttggaaatgccatctggttcaggcattgattttatgctgtctcatcccccgaagggtgatgattgtatcacttatcttattccttcagtattctcttagatgttccctagagctacagatttccaaacagcacattcaataggagttgtaagtttataatcggcaaactacaggatgcttgtttttttttcttttaatttctggtgtaatctgctactagggcccccatagagtttattgtctatatcagctagaacactgggaccacagtcataaactgaaggatccaggcaaactgggtcatatggttacccccaccaattacagtcttcagtgatgatgtcactatccaggttgatattcagttgaaatgctagccagctccttcctagttaccttcatttacatcccatttcagtacctgaacacagtcatgctttagactctgaaattccttagaaatagtaccataaggtttatagctttgatattcctctctgatcatgatcttccctcataatcacctccccagttcaggcttttagtccattatcctctttttccctgcctgcctttctaatcaggatggaatcaatggataaccattcttacctattccattgaacatccttgacttggctgaaacccttcacattttctaaacatatttttgtcaattctccatagctaggaaaaattaatttctttctttagttgcttctgggatttctaaagtatcaagtcatgtaaccttaccacttaattccatttcttattcatgctgtaacatcagctgggatcttaatgttactagatgcacctaattatctctgtcttgatgacctatcatcttccccatagcagttgatccagcccaacttcattctccttggttcccagcgtaactctctctcatgctctacagatgacccctccaccgtcatccattgtgaatttctgcaacatggtacctgacatttggtaggtgcccagtacgtgtttgttgaataaaccattgaattttctcctgtacttcagcaactcttgtaccttcttctatccctttgtttcctgtcttcccttttatgattatgttctgctggactctcaatcatctcctctccctttcttgcattttcagtctccctctcccccacacccccaggcttcatccaccctcctcccagataattctttcccatgtgttactatctttctactatgtgtttttaatcctgttgacagttggtaggaaatatttgatggtttattctacctgtagaaaagtccaaattctcttgcagggcattcagaagtctcttacatggcttcagcctgcattttcagccttatacatgtatgtgactctcctggcatcctaaaaccattgaccttttctttctctaggctttcattcccaccgttctgccccatctgaaatatttttcctttttttgtcaaatggggttaatgtatgataaagatatttgtcaactctaaagtgccacttcttatgacccgtcaaaatctatatatttataaatgttcacctgaaaagatgcagcctttacaagtctttacaggtgccttgctctgctatactacccttgctttacctttttcttataagaccataacttatcttccaattaattgtagtcatatctctttttatctgttagaatccaaactatagtttatgtgtctggtatgtcttgcacataggtcctcaataaatattagacaaagtaaattgtatattttaaattttttttcatagcttttggtaaggacttcatggtccacgattggatattgtagaaagcttatccagcccactgcccaggacgactttgaatgcggaccaacacaaattcataaactttcttaaaacattatgaaatttttttgcctttttttttctataggccctgttatagagcctcccatcttttagcaaagaactgtctaatacaaatgtaatgtgagccacatactttttcgttttctttttttaagatggagtctcgctctgtcacccaggctggagtgcagtggcgtgatctcggctcactgcaacctccacctcccgggttcaagcgattctcctgcctcagcctcctaagtagctgggattacagacatgtgccagcatgcccagctaatttttttttttttgtacttttagtagaggtggggtttcaccatgttggccgggctgatctcgaactcctgacctcgtcatccaccaacctcagcctcccaaagtgctgggattacaggcttgagccaccgtgcctggccttactttttcattttctaatagacagtttaaaaatagtaaaaagaaacaggtgaatttaattttaacaacattttatttaatccagtatatctgaaatatcatgtgaccaatatgaaaaatttaataagatagttcacattctttttttatgtttctttctttcgtaagaagtcttaacacttcttttaacatttaacagcacgtctcaattcatactagccacacactgtgtttgatagttacatgtggctggtgactactatatttggacagtgtagttcctggatgacttgaaatttcttatcactctttatttttccattaagacagacggtttgtataacctagtaatgttttctaaggctgagccactgaatttttattattgtttttaactattcttgtttttaaaatttaaaaaaattggtttggattcagtataattagtatatcaggtcacttgcaccattttattttttaacttcttttcctgtagccctgcaggcgggcagggcttctttcatgtggacaaaaccagaaaggtgttgcatcactgatccacacacaaggtgggctcctgccaactggcagcctccttgttccaggaaccagccctccttttgacacttgaaatgtaaaatcagaatagaagtttaacgtacctgacttaaaacatcttcaggggatgctacgtgacaattcttgaagaaggagaaacgagctaccattttcctggaaacaatatttgattcacagtattttgttgtttggtagttaatgaggcttgttttgatagaagatgagtgtttttctatcgctaatggggcatttagagaaacattccttgtaggatgagctctgttttatgacctcattgaaaaagaggtatgaaaaagaggtaaatctttaacataggcaaaacaggtagtgtttcagaaatttatgtgtaaattaccgagtatatttttctccagtgttgtaatggtcatattctcagatcacctcaaaatacctatttatgcagtctgtaatgtagcataatccagactgttactaacattatgtagcataatgttaataataataattacgtacataatgttaataatacacagactccagccatcgtgggtaagatttttttccatgggaaaattcatttggaaagctaacttgtaagactagccaggtaggcagcctagccctggaggcagagctgctcctcacctggaactgcagaatctgattgaacccagtggtccatgggggttgctgaattcgtaaagcaaatgaaatgttagaagaccctctaattgttgtagagtcacacttttcctcttgcagaggaggtactcacattttttttaagaaacaatctttaattatcgatgtattcttttaggtttaggtttgcagacactggtgagcgtgtgctgagaggtaacttgatgtatctttctggataattagatgattttttttttctatttctttgaacattttttttttaaagagctgcttaagatctggaggagtgattccttttgaccgtgtcttattttcattaagactgtataacttggaagagtttttttttttctttttctttttcttttttttttaagatgaagtttttgctcttgttgcccaggctggagtacagtggtgtgatcttggctcactgcaacctctgcctcctgggttcaaacgattctcctgactcagcttcccgagtaattgggattacaggtgttcaccaccacacccagctaatttttgtatttttagtagagacagggtttcaccatgttggccaggttagttaatgttactctctggtttggggggcagtgatatgttttggcttttttcccacccagatctcttcttgaattcccatgtgttgtggaagggactcggtgggaggcaattgaatcatgggggcaagtctttcccatgctgttcctgtgaagtgaataagtctcacgagatctgatggttttaaaaagaggggttcccctgcacaagttctctctctttgcctgctgccatacatgtaagacatgacttgctcctccttgccttccaccgtgattgtgaggcttccccagccatgtggaactgtaagtccagttaaacctctttcttctgtaaattacccagtctcaggtatgcctttatcggcaacatgcaaatgaactaatacagctcggggtggcttgtgtgggtgcgtatggccatgtatgcaggtgtgcgtgcattggaatatacaattccgtattgaacccagtttaaacttcatcagttctggtgattgctggagtgtcacatatggcaagacgtcaccttgccctctaactacaccagaaaaccaggccagcaccattgactatctagatacagtgggccgtttatattattattgtttcatatttttagattatttggtaaacaatttacagaactaagaataaaggaatagtgagaaataactattagcaattttaataagagttaacatagtaaatattttaattttacgaagaatttaaatatggtaaacccacatgtttattctgtattttcccagttttgaaggtatggatttctgaaatgagcattatcctttggaatgcagctagctgctaatcacctgccatgcacgaacctgaaatatatccgtcttacaaatactggttctacatttcaaatacatctctattaggttcatcatatttcttggtcttttttttttatacttgcaatttcatttaattattgtaaaaatttaagatatttaaaacattgacagctcataattttattgaagagagaatatagccatcttccctcaggaataaaatgttttcaagtttggatttgtaaacagctattaaaatgatcaagccagtctttttttccccctttttttctgcattatctcttctaatcaccttagagagattcctgccttgggcatttgtccacttcctaatggtatcaaataaatgtgttgcacagacataaaatgtgttgcataagcatcataaaatggcaaggaatactgtcacatcattttagcaatgatggttaatgtttttgtcacataatattgagtgatgatatccttcctgttgaatgactaagtggatgagaataccatatttcctttttattcttagaaatacattgctcagccgggcgcagtagctcacgcctgtaatcccagcactttgggaggccgaggtgggccgatcgcctgaggttgggagttcgagaccagcctgaccaacatggagaaagcccatccctactaaaaatacaaaattagctaggcgtggtggcgcatgcctgtaatcccagctactcgggaggctgaggcaggagaatcaattgaaccagggaggcagaggttgcagtgagccaagattgcaccatcacactccagcctgggcaataagagcgaaactccacctcaaaaaagaaagaaagaaagaaagaaatacattgctcacttgtcaattcttgagcttgagaaaattcatctaggatatcatgtgaaggctcatagcctaaggttttacttacgtgatcaatttcattcttcttctggtttatctaattggtaaaatgcctccttctgtcagttgttcctatttgccaatatgtggaagatgatttttgactatattcagtgagtctccagacttctttttatcatgctttttaaagagatgggacctcactctgttgcccagacttgagcgcagtggctattcactggtgtgagtatggtgcattacagctgcaaactcctgggctcaagtgatcctcatgcctcaacatcccaagtagctgggactatgcagactttttttaaaccatcttgaaagatgatgcagtactttgggaacacagcaataaaaatgtgataatttccctattgcatcacctttctaggcaattatatcattctttcatgctcatattattttgtcttctttagcacagtttttaaatagttgatggctaatgatgaaataattcttcggatgataaatattttgtaacataggaacacaatataggaaaaagatcgaggttcataccatatctcagactcatggttaagtacaagctagaatgagttttagtcgattaaatttctttttctctatgaatggataaagtgagaatatcagcccacaagtagttagaagtgctcagaactcaaaggtaaaattgtgtccaagacctgatggtattctaaaggttaacagcctatcctacttaccaagaatttacatttattatgaggcctgtacaacctgatgcaggaaaatacttggcataattttctataagttaggtagttaggtgctcaacaagtatttgagttgaatcacattggcattcacatcaaacacatacacctacgtcatcatgttaacttaaggttaatagtgtcaccaaaactaactggtctttaaaaaagaaaaactaggccaggcatggtggctcatgcctgtaatcccagcactttgggaggccgaggctggcagatctcttgatgtcaggagttcaagaccagcctggccaacatggaaaaaccccctctctactaaaaatacaaaatagccaggcatggtggcatgtgcctgtaatcccagctactggggagactgccagagaatcgcttgaacccaggaggtggaggttgcagtgagctgagatcgcaccactgcacttcagcctgggcaacagagcaagactctgtctcaaaaaaaaaagaaaagaaaagaaaagaaaaactaaggaatatcattctagacatgcagtaattaagtaaaattgcatcaggagtctaataacatagcatgatgggtcccatgtttcattatttccatgggcagaagagggatggctacattataaataaaggaaaattgtaagaataagaaaagatgaagtatgaaatatttccaactcaaaaacaaactgtatctgagcatgcagaggtacaaaatgtcacctttttcctccagtgtaatgaagggcactaaacctcttgagcatttgatatgttccagatactatattaaagtgatttttttttttaggagacaggttcttgctgtcacacatgctggagtgcagtattgcaaccatagatcagtgtaaccttgaactcctgggctcaagtgatcctcctgcctcagcctcccaaatggctaagactacaaacacattgccaccatgcctgcctaatttattttgatttatttattttttttgtagagacaggggtctcactatgttgcccagactgttttcaaactcctggcctcaagtgatcctcctgcctgggcctcccaaagtgttgagattacaggcatgagccaccacgccagaccaaggggtgaaatcttgataacaataatcaatgcagtcatcataaaacgcttgcacaggctcaatttgtaggtggcacagtgctacatctagtcaaaagcaaatttaattatggtcattgtgctctgagaacttttctcagaaaataataaccagatggtattatagatggtgcatttcacaaatacatgatttgtagttagtgaaaacttgtcattcaatcatgtaataaattatgcacatgccgtcttccacttagctagtgatgttgaaacattcatagccttacctgatgagctcaggctgtcatgagaatttatgtctattcagtactttgtctttaaaattaggtgagagagaaagagaggctgtatttgactatatatctttttatttgtatctctggagttacaagtttttgaatatataatctttcagctgcctttctgcattgcattttgagaaatgatattaaatgctcaaggaaaaaaaacctaacaactttagagggccgcaaagtgaatcatacaaaagataaattaaagctttaaatctttgccagtggatgagtcaagtaagagtggatttaatgaaatggctcatggctttgagaagcagctgtcataatgctgggttggcagcttccaggactgtgtgaggctttctgactgtctatactgaaataggagaactcatttgaaaatgacgaataggagaatagcagaaacttgcattttcttttgagggaactggctgccagttttgaggtccttatttagaaatgctcgattcctgtattgaataaacttggactacatgtatgtcaaaaagaaaagcaaaacacttttatagccttaagcagattacagatgtgtggccaaaccagtggggtctgtttttgtttccaagcaggtgatggctggaagaggagatgcctctgtagtgcagggcttgagttgctgctgtctgagctacatctggcaatgagactgtgctgcttactgagacctaatggcacaggttgccccagtaacaggatattgctgaatgagaaatactgtaggattcatttgtaagagttatttggagggttggattattcagtgctaaggatcctaagctactgatgcatggactcttttcttccctccagtatcttttaattaaactgtacaaattccctggcttaaaaatagtaggaaaagaggaagaaaatacagattcttatgattttaactggtctctggcaatagtacaccgaaacattaatttcttgttgaaaccatctggatatttgtatcttcagtgtaaaacccctaatttagataggactctccattgtgacatggaaaaataaccctttaattagttaattaattttactgtggcctcaaaatctacatattagcatatcaagccaaaaactgttggctttacttgggagccatgtggcttaaactagtaccagtaacttaccacaaggaactcagcaaaattataagtccatgtttgttttggaaggaaggcaattattacgaaaataatttagagatgttcaaactatttcctttgagtagaggtagagagtgaacaaaatctgtcccaagtgggagctaactagcttccttttttgccctccctgtttacaaagtaacacttttagtttactaggtaacatttgcagtatccccagtgtttcaatgtaaaattgtaggtggtagactaatgccacttagccaaagccatgatcacctgaatttttaatatatatttttgtatggagtgagatactgggagaacagtcttcattagcttaaactctagaatgtactgtttgtttgtttgtttgtttgtttgttttgagatagagtctcgctctgtcacccaggctgcagtgcaatggtgcaatctcagctcactgcaacctcccctcccaagttcaagtggtactcctgcctcagtctcccgaggattacaggtgcctgcttccacactcagctttttttttttttttttaatggagacggagtctcactctgttgcccaggctggagtgcagtggtgtgatttgggctcactgcaacctctgcctcccaggttcaagcgattctcctgccttagcctcccgagtcgctgggattacaggtgccaaccaccatgcctggctaatttttgtatttttagtagagacgaggtttcaccatgttggtcaggctggtctcgaattcctgacctcaagtgatccactggcctcggcctcccaaagtgctgggattacaggcataagctaccatgcccagccaagaatgtacaatatttttaaagaaatgcggtttattaccataaaatacaggttgagcatccctaatccaaaatctgaaatgccctaaaatccaaaatgttttgagcactgacatgacagcaaacgtagaaaattatgtgactttatgtgttcaatgtatacaaacttcctttctgaaacaaaaattatttaaaatgttgtataaaattgccttcaggctgtgtgtataaggtatttttgaaacataaatgaattttatgtttatacttgggtcccatctccaacatatcttatatgtatggaaatatcccaaaatttgaaaaaaatctgaaatctgaaacacttctggtcccaggcagtttggataaggattactcaatctgtaaatacagtagctcaaattgattttgtaaggcagtcaagttattatttatagtattttaatttgtattattcttttaatatagcaattcattttatatatttatataaataaattttttgcaattgagcaaattaaaaaaattaagtgcttccttcagatctacattttattttctatttgttatcaatttaataagtaaaggacacacagatcatctgattgtgttgtcagacatttgaaggtgcaactgatgaatgttcactgttgtactttgttttgtcatgtaaattgttttaaagagaagtgaatgttgagcatatagtaggccacacgtgcctgtggattggctcattgttttaggaatgtgtaattctggaaaagatttgccaagggtattcaaaagtatagtttgatattagaaattatttgaaaataatctttatagcatagcaccattttatttagatcaatagtaattcaagcagtatacataatttgctattgtaagcgtagcatataacctaagttttcttttacatttgagaccactgtttgctgttggtcgaatttggtcttccaagattttttgcttagtgacctaattgccagcctttgtgaagagctgttacttattgtcaaaccaggcagtaagggtttgcttttatctttttatcagttctttcaatgctagtagtcatgagattaatgtagttggatactaaaatgttaatacgtgttagataacaaactgggaaagagatgaatgacatcatgaaggaaagggcagtattgcacttacagtgatttcatgatgatagaactaacctgcctaaaaagacattgggtggaaacagaaaccaggtgtaatagacgcatccaagtagtcaaggaaagaaaagacttgtaagtaaataagataatctttgcttcaaaaatatcttcaaaggtttaaaatgtgctttaccctcatatataatctttttgagcctatttctttacctcaaacatggggaaaattgcaataatctgtatcacggtatttgcttccaaaacgactaattggtgtaaatgcatatcaagccggtaaagtttacagtggacttgtttaaaatgcgtagattggaattgttgggggagcaggccagcagcatgggatgttttttttgtttgtttgtttgtttaagactctgtcgcccagactggagtgcagtggcacaatctcggctcactgcaacctccgtctcctgagttcaagcaattctcctacctcagcctcccaagtagctgggattacgggtgcctgccaccacgcccagctagtttttacatttttagtagagacagggtatcaccacgttggccagactggtctcgaactcctgacctcaggtgatccgcctgcctcgggctcccaaagtgctgggattacaggcgtgagacaccgcgccagctggggtgatttttttcttagtcaaatcacttctctacccatcatctcacactgtcgaatacaaagactctccttggggctcaatgactcatctcccacctctggtttgataatcatggctattataacatgttccctttttaattagttattttaaaattattgtaggtcttgtaatcataatcaataataatacgtaatggctccttaagcacttctatcctagataaggttgagaacattattaaaattagttttggtagtaatcaagtaatgataattcttatttatgaatttaaatatgtaggagtttttttattttagggaagcaaaaaggactagaaagtatgatgtctcatgattagaaaactgctataaaaatgaaggtagaattgatttgggctgttttggacattttaaatagaaatttaaataggtattcaaatagcaaagtcattctactttaaaacttctatacttttttaggatcttcaattttatatttaaattatatttttgaaatggttttagaagaaatattgtatcttaaactctaactactaataagtaagagaagatatatcaaaggtttgatcttttatctcctagaatatactattcattcgtttcccattgtacgtcatttgaatgttaatggttagcctcaaatggttttcaacataattgtatagctactattattggaaaattggagccaaggactcatacacatatcagaagtggtaatgaagcactttggttttatgaaaatatgtttacaaggtagtcacaggatagcaatattgcatttactgtaatacaatgatggtggaactaagtgcagtggaacaggatgctgagaccacagttaccgcatctctaagtgcctcgtctagttatggtccaacctcagatataactcattggtgttgaaacacacctagcaacattttaagcatagaccgttcattaaaaggtacctttttaaaaatttttatttttaaaaattgacatgtaataattgtacacatttacagggtacacagtgatcagatcagactgatcagcatattcatctcaggcatgtatcatttctttgtgttgggaaaattcaatatcctgcttctagctgtttgagattatgtcatatattactgttaactgtagtcatcctacagtgctgtagagcactagaacttattcctcttatctagctgtaatttggtatcctttaacaaatctttctctatcctcagtttctacctacccttcccagcctccatcatcctctgttctactctttacgtctatgaaatcaacattttctagcttctgcatatgagagcatgtggtgtttaactttctgtttttggcttatttcacttaacatatgtcctccagttccatccatgttgcttcaaatgacaggattttattcttttgtatggcttaatagtatttcattatacgtgcatgcacgcacggacacacacacatacacacacacacacacatcacattttcttcatccattagtctctttggacatctaggttattccatatcttggctattgtgagtagtgctgcagtaaatatgggagtgcagatacctcttttaatatactgatttctcttcctttagataaatgcccagtagtgggattgctggatcgtatggtagctctatttttagttttttgaggaatctccatactatcctcaaatggttgtactagaacagagcttttttaccttccttccatttgggaatcttcttacccaacatgtatattagtaacttggctatgtatgttccattctctgtctcaaatactgtgtctaggacatctgcaatctttggctatgaccacgactgtaaagtgcatgacgcttttgctctgtcatcagtattagttgacaggcaagtaagatagtacttctcttcataacccctttacctgcccagcagaataccagtacagacagacccagaatatctctgggctcaagaatccagacatttataggatgggacttttatctataaatcaccttaagattagtaagttcttagaattggttacctttgccatttctcagaagccctttgtctagtaacctgtgtgtcactgtcatttccagcctgtctttcctacacattgtttatgcaggctttaggagtgcccaccccccagttctaccccccacccccaccctagcctttgtggttttaattatcctgtcttggctgattttgttttgttttgacatttcatccattaaattcctgacactggctatctctttacaattattatactatttttctttctggctcgctcttcctgattgctgtaatccatgcccttgactttaaataccatttgtaagtagactaggccaaggtttatttctctaggccagactctacctagttatttcataggcatatgaatcctaacatgtccaaatgagagttcttaattcccctgctacccagtcctcaatgtggttctctcaaagctattctatctcagtaatggtcctatgccctctcctagggattattgctgagaacctagaactcatcatcgtctcttctgcacatcctatgaattctggatttatccacttatctccatcttttccagcactaatctaaactcccattgtttcttgctggagttatttccgtatcctgctaatctctgctctcgttctctctccctgacacatgcgctgctttcttctcccacaccaagccattctctgtacagcagccaggatgtagagtgtttatttacataaagcagatcctggaacccccaaatttaagttgtgttcgtggcttaccaatacgcttaaaaaccaagtgcacagagagaaaacaatgaagccttatttggatatgctgaggataattgataacgggtaacaactaacaaacacgtagttggtgtcaggtttgacctcctacattccttacaggtattagtgtatttgacccagctcctccctacctccgcagtatcaccccatgcctctctttcccccgactctcccctgctcagtgtcacacaagtcaatatccccagcttgctaacccccgggctgacagatctcattgtctataatggatgttccaaggtcccaccttcagcctcagttttgttgccatctttccagaatgaattcccttgatcattctgttttttggagacaaggtcctgctctgtcacctaggctggagtgcagtggcatgatcatggctcactgtagccttgacctccctggctctggagatcctcctgagtagctgggactacaggctgcacctggctaatttttttttaatttttagtggagacaagatctcactttgttgcccaggcttgtctcaaactcctgaactcaagcagtcctcccacctccgtctcccagagtgctagaattacaggcatgagccaccatgcctggccctgatcattcttttctgaagaaaacaccccttcttcattattctcaatcctagcagcctatttacttccattctgaaatgaatcacattttagtattttattggttcgttgtcgttctctccccccatagaatgtaatctctctgagtacagggagcttatctttttcccttttggagcctcggatccagcagaatgccagacacttagcagccactagcatttgatgagtgaatggcttttcatacacaattttagacattgttcctgattggtctctctagtcaataatagatttatcaaatctaatcgataatagatttctttttcttttctttttttctttttctttttctttttttttttgagaagtcttgctctgtcgcccaggctggagtgcagtggcatgatcttggctcactgcaggctctgcctcccaggttcacgccattctcctgcctcagcctcccaagtaactgggactataggcgcccgccaccatgcccagctattttttgtgttttagtagagatggggtttcactgtgttagccaggatggtctcgatctcctgtcctcaagatccgcccgcctcagcctcccagagtgctgggattacaggcctgagccaccgtgcctggccgatagtagatttcttttattgattagagagactaatcagcaacaatgttttaaaattctcacatagatctctgaatgggaaagcagtcttgaattatgcttgcagggagagagaggggaaggaaggaggaggaatggtataattagacttcataaggctagattttgtttctacttaaataatggtatcacagtgggacatattatccatgcagaaagtgagtgggcatctggtctattatctgtggtctttcaggaatggcagctctttagtttaaaaaacaacaaagtgcagcactgtttatttaatggaaatagaaaagcagtgcctgtgtattagtggctcagatttttttgttctttgttttcagctgtctgctgtatgcctctccagcggggtcttacagaatctcaagtctaccatgatcaaagctgaacccattagctccatttcttaattcctcctgtatcctctgttaccattagtaactattctccaactcaaagcatcagattcctcctcttactcactcccttcatccccagtcaccagttctgtgctgttattttatccaagttctcagtaggcttcacgagcaccgccttcacatcccaactgtcgctcctccacctatctgtcctccatgcttctgctagctcatgtttgttgcaatacaactaaccttgccactcttctgcttcaggcttttctactaggctctgcatctagatgatggtccagactcctcagcctgtgaaacaaagcccttcataaaagagcagagctacagctagtcagctcccttcctgcagtccaccccctcctccaccatactgagaattggcaattcctgtagcactctttgtatgagtccattttcacactgctataaagatataaccaagactgggtagtttataaaggaaagaggtttaattgactcacagttctgcatggctgaggaggcctcaggaaacttacaatcatggcagaaggggaagcaaacacatccttcttcataaggcggcaggaaagagaagagcgaggagcagagtgggaacagccccttataaaactgtcagatctcctgagaactccctcactgtcacgagaacagcatggggaaaccactcccatgatccaattccgtcccaccaggtctttctctagacacatggggattatgaggattacaattcaagatgagatttgagtgaggacacagccaaaccatatcactcttcatctgctacgggtgccattccctgtttctacagtgtcctgtttgctaccttctttgtagatttctattcattcatcatgtcccagtttacctgttacctcttcaacagattattcttcagtctgtccctcccaaactccaccaatgaacattctttgttcagcccattattgttaatatgcacttcactgaaaacactgttttatgcttgtttacatcccatctctgcagggctctgagcctatagtcagcagttgggaacttactaggcatagcgcccagtaaaggatagctctttatatatatatatatattttttttttttctaaaataataagccccaagaaaaacattacctgtgaaaaacaaatgatatttttataccattttcaaaacctaatagcaataaaaagaaaagaaatgtcataagtatacatttaagctgtagttaaaaacagtaaataggcacagtatttaactcttatcatgtgctgttccaagtgtgttatttacatcattggctgttcacaccatcccctgaggtggttaatatttccatcccatgttaaagatgaggaaaccaagtcacagcagcctaagtgacatgttcatagtcacattggagctggcaggtggcagcactgagaatgaaacccacgtggctgagctctggaaagtcaccattaatcaccacactagaccttctctctaggatctacataactagaacatacaattaactggagtatatgtaagtgtagtcgttccttgagaaaggaaaagaattcacaaatttcatagcctcatcccttgtgcatttgtggcattgtgctaggggtgtctatttgatatttgaccctacagatttctcagatgccaaccaaccacagatactttaaaaaaagatacttaatacttaccaatgcaagaaagtgggcttgttggaagaggaaaaatgttagctcactaatggaaaatcaactaaaagtcttacctctccagaacatgcttttcctaaatgttgtggctaacccaagaagctacatcatctttacctttatgatacaatttaaagtacttttctacttacttcaagccctcagagcacagaggcaagggaggccttgggctataaaccctgtagcctgagccacatggcttcttctcctggacagatacctggcatattctgccactgaggatcagtggtgcagatgtatctgttttctcctaggaatggggctccacttacgaatctggggcaggacaaggtattgctgcattttggggagcgtgctggaaggaggagcagagtttgttgtttttgcttcctgatatggactggctgtgtctccattcaaatatcaacttcaattatatctcccagaattcccacatgttgtggagggacccaggggaggtaattgattcatgggggctgatcttctctgtactattcttgcgataatgaataagtctcacaagatctcatgggtttatcaggggtttctgcttttgcttcttcctcatttttctcttgccttttcctcatttttctcttgccgccaccatgtaagaaatgcctttcacctcccgccatgattctgaggcctccccagccatgtggaactgtaagtcccattaaacctctttttctccccaatcttgggtatgtctttatcagcagcatgaaaacagactgatacacttccttaacagaaccaattattttttcccaaaaaagagggggagaagcccagaagcatgcagcttctctcttctttctaaggaataggtcttcacaaagtgcccccaaaagaaaaggaccaggcttttctcttactttgtgactttcctaggttgctttgtagccattttggacacagaccacctatagctgtgtagtagttctcatgtgtatggacacagtggaaggagatgccaggcacatagttcttgctgcattgacaccttttcagggcatcttcttttaccatcttctgtagaaactgcaacagcccggccaactaccagccccagcccacccctagctttgctgctttcattttctctgtaacacttgtcaccttgtaatgtgctagtgtaacatcgttgttttagttttcttatatctttccttccctgtagaatgtaaataccaggaaggcagggaattttgtctgctttattctctgcagcatccctagactccagagcagaccctggaactcaaatatttgttagacagccaaaggtcatatacttccaactctccacccaaaatatatatggatcacccatccttagtagcagctaaacctttggacatgaggaatttgctcgttcacagttttctggcctagcatctgattaaccaaactttttcacatatcaagaatttaaaatgactccaaaactttttatgaccttaggtgcttctccttaattctagttggttcataaagctgtcagaacaataatctgcttttgataatatatgacttttcttgcctccaagatagcctttaaaaaagcaatttagccttttactgtaattatattccaaatttaagtcttgccagaatatcattttccccctttaaacatactttttatgatgccaagatattttaaagaaaagttcagataggaagcatatttaagatgtcagtatatgtctctaaaatctaagaacatttttctacagagtccagatgataccatctcacccacaaaattaacataaatttttagtaccattggataccatgtccatattcagattctccctgagttccagaaaggtccttcacaggttatgcatttcacatcctatccggcaccagggccagcatcttacatccttaattcttaggattcagaatagcactttttatatcctgacactgacttgctgaagaagctgtaccagttttcctataaactgtccactccttggatttgtcttatatcatgtcccaggggtattgtttagattgttgctctattgctaggatattcatgttaccctaagtgtgtactgagatagcagagtaaagagagattgtcttttaaaggttctgcccaggaactgctggtttacacaaaagctgggctttagtgcttctcggatctctttgcttgtttcagtaatttttttttagaaattcactaattcactaacgtaagtggggcagggtttacaggagcatgtgttgagagaagttggtttgactttaaatggtcatttttacaatccgtatttaggccttacaggtcgcatacaatctctgtcacatattgctgtcatttttaccccctttcttttctttttataatcctttaaaaaatgcaaagcccacccttagctcacaggatgtacaagaacaagttgcgggttgcagtttgccaagacctgctctgtgccactgctgacttgccattcttggagcccactttctgttcttgtcagccaattccctttcaggtgctcaggtttccctccctcctgtcaccgggcctttgcacatgctctacccaccctgcctagtggagagctatctttggcccctggacttcattcacttcggaccttctttgggtcacatttcagtcatgcctcactagacacctggaatctctgcctcactagacacactagcactcactcttttgggtcttctggctgtatgtaattgttatcagggcagtaattttgcatttatacaggtgctgaggtcagtgtctggcctttggctacttgccttgtgagccacctttgctttccagtgtacccctagctcctggcccagtgtccagcttcccagcatccattcatgttttccctggagaccattctgtgcccagcagccagagacatcattgcaacttaaatctcattgagtcgttccagttgctgtaagaaatgtaaccgtactgggtaacactatgcctgtctgtctccaccaccagatcttatacttcctccctcatctgctactccctaagctcactggccctttgttgtttttgctgaacgtgctaatctcttcctcacacctgggcctttgcacttgctcttacccctgcctcagccatccatgcactctcttggttttgccgtgcccgacttcagcatttttagttcacatggctcttccgtggggcccttccctgaccaccctgtttgaaatgctacccatccctggcacacatctatcatagtcattcattagcaattagccccatctcctttccctatagtacttttccataattttttttcttgctcatattacacctccccaactaatagatagattccaagaaattgagtgctttatcttcactacctggaatagtactggcacttggtaaagcacagcgaatattgttgattgaattactaggggttggcttagagaggtacttaatggaatgattcaatggatgaatgaatgaatgcattgccacttttttgctcattatcatcaatttgtacatatgcctttcaactcaaatatttatccattggctaaagaaaaaaaatacctgaatccccgtgtctctgcagtttacccttcctcactgttaaaactcagtgcctgtgtaaaatttcattatattttatttacttcttattccacttgtgcattatgtggatattcctgcctcatccccacagccacctatcacttccggccaactcagatgcctctggctcgcaacaatcacttctctgttgaatttctgaagcgtttaatctgcagtatgtctgttactcatacagcagttagtgtgaattgtctcactcagaataagtattcattaaatgtgtaagaatgatgatatagcctaatttcagatcaagattgtgatttatagctcattcttaatcagctgtgtcatgactttatttatttattccttttttttttttttttgagacagagtctcactctgtcacccaggctggagtgcaatgcagcttctgcctcctgagttcaagtgattctcatgcctcagcctcccaagtagctgggattacaggcgtgcacccccacgtccagctaattttttgtatttttagtagagacggaatttcactatgttggccaggctggtctcgaactcctggccccaagtgatctgcctgcctcggccccgcaacgtgctgggattacaggcatgagccacctcctcaggcctgagtcatgaatttttggtagtccagtcatgtggttatcttcctaaagctggaggccttaaacctagggccccaggtgggcttatgcctttagctgcaagtaacaagaaacccttttcaacctttttactgatttatttagagagaagtacacataagaggtaatgcaagtaagcaaagttttttaagaccacacaactagatagccagcatccggaccagaacacagagacttgctggcccctagaatcctctctcctggcccctgccagttactggcctttcccctgagttctatttgcctgcagtttgcttgttttcatatttaattcaaatagaattaggtgatgtgtccccttgtgtttcgcttctaacagtgcctttatgcgggagaagtactggctatttcttactttgccctccctccccggaaacattttcctaatttagtagcagtaatttcaaaaactgctttcctttcggacaaactgacttatccagccattgtaccttccagtttagactctggcagtttggagagttgagacagagagaaggagaaccgtctgtttatcttcttgaaaaaaactactgtattttctctctcttctgactctgggagcctctagactcttttttcccattttcatatccacagaggaagagtctgaacctcttcctgctgagctttcccctggttggttgcatttcaggaactgacattggttgtcttccctcttccctcatcagtgcaagtaggttggatctcatgatagtccatattcacataaccatgagaatcagagctttctctctgtcatttcctccctgtttatctgtagcaagaagaaaaaagtccgtcttaacagagactgtgaaagaataaatatagactttattgttttagagcagttttaggttcacagcaaaattaggcagaaggtactgagattctcccatatactccctgttcatacacttgcacagcctctcccattatcagcgtcccccttagagcgatttgttacaatcagtgaacctacactgacaccattattatcacccaaagtccatagtttacattagcattctctcagcattgtttattctgtgagtttggaaaactgtctaatgacatgtacccaccattgtagtgtcatactgagtacttttactatcccccaaatcctctgtgttcctcctgttcgaccctctcttgcctttaacctttccaagccactgatctgttactgtctataattttgccatttctagaatgtcatatggctttcttagaaaatacaaatggtgacttttttggcatgactttaataaacagaaatgaaaattggtgtgtgaatcaaaatctttcactctgtaaagggacttatcaggcggcacctgcatgtggaattatatcaaggtcagctttagttagaaacagaaggagagtcacctttgtgatgtcatttctccttcatccaagtaaaatctcgcatgctgacacataaaattttatcatcagtgatttatttcctcgtaggaatgtccctttgaccttattaaattcagatactctggggatggtcagcattttcagatggttcccttgttctgtaaaaatgtttgttattggtgtttaaaagctgtaaaagccacccactataaattgatagccactaaagtctgcgaatgtggtatgaatgttccactatgttgccaagcgtttattttattgtgagttgttatttgattgtttgtaaggaaattgttttatgatgctcagctttatatttccataaactgttcctcccttgcaactccttaaactgtgatgagcttttcaaaacaagtccacaggacaacagtctgtccagcatttgaagaagtggtggaaaagtcatttttttcctttcagtgtttctagctgttcatgaaaactgcagttaaaagttgtaatgttgttgtgtttggcattctttgggaagatgcagcattattcaaacaaaaccgtgtgctcttgttttaaatagtgtccaaatgaataattgaattcatggacatctaaatttaattccagaaatcaaagctatggtaataagaacttggacctgagttctcttaggccaagtaatttaattccttagccggttgaactatttattacgtgtctccgttcctggttattatgccagtaaattgctcaggcagatgcagggatggatgatgggcatataattcactctttttcacggctagacacataccagaatgcagatcacactaaacagctgtttttacaaacatggtttctattcagagctttaagggccacatccaagtaataacaaagaagcctggagaaggaacctggggatacccagggtcatgttttcaccatcccacctggaaacacggtgctgtccaaaccctggatggtacacttggacatcgtcattccagtcatggttcaagatcacgtgtatacatcatgatttaaagagaatactggtttgatttttcttcctgactttccctgaattttccacttaaattggaaaacagcgctagttagtgcccatgatttgattgaataagtaagagatctcaaacacggtaaattaactgatgacatgcatcaggtcatctttctttgattcaccagtaatacaacagtgagatcctacagaaaaatgcaaaggcagaagctcagggcagctgagcaactgttaaggattcttttgaaatgtagccccacgtagtaaactttcgtgcaataatttgggcagtcaaaaaaaaaagtcagttatttcacctcatttatttctacgaggagataaaggcttccaacatctgattttcagtgccagtgttttctgtttctcttttcacctatttcgtcctagtcttgtggaaatgttacaataactgattaggattttctctgtattaacacttcatttattaacatatgagtaagttgctattaataaattattctgcttaatcagtttctttttattctttagccacatgctaaacttcttcggatgtcttcacttaatatccttacatcatatttaatcagagttagaaaggcgttccacttgggggtcatacacatttttttgaaacttttataaacgccctttatactattcttgtatcctacgtaatcagagtcaggtgttccatggggatcatacacatctttatacaacttgtgtaacacatgctttaaatcctgaggtaatcagagaattcctgccattgatggattaatctctttacatatctttccctttcactctcagcaaaactacttatggcggtcctgttagactttgaaagcctttcaggtttatggaggagtcttcctttctattgtcgtagatcatggaatcatagtgttcgcttgtctcacgtgtttggaatctgatttcctacataatgctgtgctctcactacgagtccaaggcttcctgtggctacaaatcccgggttcctatcacttttcccaatgatgagcttctccttgttggccagaatcagctctgtggtaataattcccttctgctttctccctctcgcttttttttttccttctgggtacattataatgtcagcatagcagcttttaattctattactatggtacttctcgaatagacctgtggtagttgccccagaaaggttgaaaccccctgccacatctaggtctttctcctgtattggttttgtgatctgatcaaggacatctattcctctagtcctgctaggtggtatacgataggcttttactattagatattcaaatgctgtcaaccatgcctgccttgacaggtacatgatttccacaaggatttcctaataggcctttttaattttgttctagacatgcccttcttttgccatccaaatttgcttattttttacaaactatgatgcatcagcatgtaaatgtttaataccataaatatttctgatcctcttcccaatttcactgagttactggttatctcttgccattattctcagcatattgcagtggatctcagaatattttcccctgaccaccagcatcagtattacctgggaatttgaaatgcacattctcaggccccaccaaggcctcatgattcagaaactctggagctgcattagaaactgccacaggcacctggtgatctgtgttggtttttgtttgtttttaaggagacagtgtctttgtctccctggctggaatgcagtgatgcagtcatagctcacagcagcctcgaactcctgggctcaagcaatcctcccgccccagccttctgagtagctggaactacaggtgcacaccaccatgcctggctggtttttgtttgtttttaaggaggcagtgtctttgtctccctagctggaatgcagtgatgcagtcatagctcacagcagcctcgaactcctgggctcaagcaatcctcccgccccagccttctgagtagctggaactacaggtgcacaccaccatgcctggcttttttttttttttttttttaatttttttggagacagggtctcaccgtgtggcccaggctggtctcaaactcctggcctctaggttttttcccacctcagccttccacagtgctgggattacaggcatgagccaccacatttagcaggtaggtgatctgtgtttcaataagccttccaggtgattctgatgctcactgaaatttgagaaccactgaaatatttggttttctacaaaacataagcagttagtaaccatagggtacgcaactaaatagttccagcaggcatccctgaccacagggcattgcagatttacttaagtcagtttcatcttccacctgtgtgagttccagcaggcatccctgaccacagggcattgcaggtttacttaagtcagtttcatcttccacctgtgtgagttccagcaggcatccctgaccacagggcattgcaggtttacttaagtcagtttcatcttccacctgtgtgagttccagcaggcatccctgaccacagggcattgcaggtttacttaagtcagcttcatcttccacctgtgtgtccagtttaagctctcagttgcagtttttaaaccaatttccaccagcatatactgagtatccgctaccgtgcaatgcgttgcggctcttgtatgtgcactatgagaagtaattcccataatacggcaaactcagttttgatatccaccaccccactttttataatggactacatttttcagagcagttttaggtttacaaagaattcaagcagaaactacaaaaagttccctctacctctcacttccccactccccaacagtttcccctggattaacattttgccttagtatggtacgtttgaaccaatatcgatacactattattaaccagtattcctgttttaacatgagaggcgactttttgtgtagtatagtctcttggttttgacaaatgcttaatgctgtgtatctattattacttatgacagtatcgtgcagagtagtttctaaaaatcctctctactccacctattcatcccttccccactccccctgaaccactggcaaccgctgatctttttattgtctccgtaattttcccttttccagaatgtcctgtggttagactcatggcatccccttttagcaactgcagaaactaagaactgtccccaaggataaaaatttttgcagacccactgagctgggatttatacttagacctgctgaattgaagttttgggtgtgtttcttctcaaattgccaaaattccatatggacgacttttcttttccttccctgaaatgtgtttaattgactttttctgttatttgtgtttgccttcacagtgaagacaaagtagtagaagtagcagaggaggaagaagtggctgaggtggaagaagaagaagccgatgatgacgaggacgatgaggatggtgatgaggtagaggaagaggctgaggaaccctacgaagaagccacagagagaaccaccagcattgccaccaccaccaccaccaccacagagtctgtggaagaggtggttcgaggtaatccaccatttgcttggattccccccacccccaaggaaaagaaagcgtaataccagagttggaaatatccaccctagcaccactgccttccccaatcaaaaacatgtttttttttccaaaaggcttcttatgcttgtgaaatttttttggtttaacaagcaaacaatttcaaataatgtgaaatctttattatacagtttgttttgtaccttgtatatgctgcttggcaaatcccaagttaattctacaagactccgcccaaccaggtagtcatctaatttgacaaacactgagttaggtgactccttggtattcctttggcagtgagtgtttgttatataatattgtctgttaccacctagacgatgagctccttgagggtaaggacttgattttattcagtattgcacagagtgcctggcttgtagtttcgataaatcttagttgagtgagtagttgtgattagatttcattaaagaaggagatttgggccaggcacagtgcctcacacctgtaatcccagcactttgggaggccgaggcaggcggatcacctgaggccaggagttcaagaccagtctggccaacatggtgaaaacccatctctactaaaaatacaaaaatgagccaggcgtggtggcacgcacctgtaatcccagctatttgggaggctgagacaggagaattgcttgaacccaggaggcggaggttgcagtgagctgagatcacaccattgcactccagcctgggtgacagagcaagattgtctcaaaaaaaaaaaaaaaaaaaaagatttggtgagtatcgcattattttatgctatgaattttaacagaggtgatttatgttgagtttacattgttttattgggaagtacggcagtgctttcttcaagaagtaaatatagtattaatgtcttagactttctctattgaattaatgtttgtgttgcaaatattgtgaactaaaagaactaaaggtcatacttgtctccatgaaataaaaacaaacattcagttgatattaaatgaccaaatgttacagaaacgagtaaactgttggattgagttccttaaagagtatgcatttgttccttaaagagttctgcatttcatatctgccatctgcttggcagatagtaaaagatgcttctagagctagattgaatgaatatgtacttactgaattttaatgtactgcaaatacttataaaggtcaaccacaaatgttacagcatttacaaaaagtggctttctctcactttttgctaaagtttaatgatttcagatttattgttctattagagcttaacatgggctattttgtctccctcaactatattcatagttgtcactatagtattttcttccctttgttgcattttttaccttattaaggtgtaatttacatataagtttcatttgcttttaagtatataattcagcggctttaagaaatttgccaagctgtgcaactatcaccataatctaatcttagaacattttcgtcactccagtaagatcacacatactcactcccagttaagccctctactcacctctagccccaagcaacaactaatctactttctgtctctatagatttgcccttttttggactgttattataagtgggatcatataatacatggtcttttgtgtccgacttctttcacttaacacagtatttttgaggttctacatttctttaacttgagcttttaaaattgagattattctgaattaaacactcagcgttagcttaaaatttattgaaagttttacatgttctttgaaaaaaaagaacagagtgcaagatggattaagtttatcattccctacttaatgacagtttcttactcactttagcacataagtaaatgtgctagtaaatgcgcattttgtttaaaccaccatttttcaaatactgagacatgctttctcagggtgtttttcatacaactgttaggaccaactatggcagatctggtcaaatgaacttgttagcctgatgcctgtagcagggaaggacagcttttcagggcttctcttctcgaaacctaaatgaagtgtgaatacaaattacagcagctagcagcctgcagtgggactgaaagtccttggtgaatctccatcaagctgggctgtttaatagaaccagtttagtgtcccattttacttgaaacattagattttgagcacctgcttggtacaagccattttgctaggccatgtggaatggatgatgagcacacacagaccagctaaccctagtggatgttaaaatctcttaggaaatagaagtcaaagaagtacaaagccatctgtgttgtaagaaatgtgaacacagaacctgcctccgagagtaagagggaacttctggattgatcagagaaggttccatggagagcatgacatttgaactagagccaaaagtgtgggtgggtggtgtgtctaccagtggattttgctgtagagtcatcaggactagcaaaacaaatgtggtgccatggaaaggcatatttaggagacaggattggtccaatttaagctagagcagatgtcttttaggttgggaccaaaatatagagaccttcaatgccaggctggcaaagatgggcattaactgcaggtgattaattaacaaatattaattcagaagctactgtgcgctgcagatttttccaggagacaataaagagattttgttttgatgctagtactgttgaggtaacaggtgaacaaggagtgacatcagttatgcagtacaatgagaggatgccacataaacttaggcccatattctagaacaagacaatttgcttgagataaattggtctcattatcgtctgcattagtccagttctttttgcttgagttttgcaggtagtattatttgatattaagacggaacacagagatgttgtattgttttatttcctgtagaaagacgaaggcagttaaaagaatttcataaacaaaacactccaggctaaaggcaaaaaagaaatgaaccttaaaaaataacaagttaataattttgttggcaagaagagcaacaaaagcaaccttctgaaagcaagatacctggtcattgagagatagcaactgttaatgccccagaaatagaggaatctttaatgcaggtccattcattccacctcaaactcctgaacaaaagctctaattgaggcaagtcttcctgggaaagggggcctaacagaaacatgttatggtcagttgtgcccatgcgagataatttttttgtgcttgtagctaattccagtaaagaagtagatgttttagagggtaacgttaaaggggtcagctgcaaagagtccttttcctcctcctcactgttacaaaaggtgacttgtggttcttccctaattgagagcaatggcaacgccataggtgattactcattttgtaaaactctaattacaagtaggttgcttctgtgttcaacataaaaattagaagtgacttgcaaagatgagatactgcagggaggcttacaatcttgttttcagtgttagtgtttcagtacctggaacaaaatgtgatttacagccatcctttctaagaaaattgtcatcattaccaacatattgctactgataccagtccttaatgtgcttcataaaaaactcaataatttcataacccgttaaaaccggaaagaaatggagggaagaaaaataagacacttttagcgtagtcataatcttctctgccatattgtgttagaatcgatgatacccaaatgagaagatgtctgttctctgtcactgattccagtagaataaaattattgtttaaaagtaagcacatccgctgcactccagcctgggcaacagagtgggaccctgtctcaaaaaaataaaaataaaagtgagcacacgattgcaagatctatctggttttgggggcttattgtcatctttggttgttaaaaaaatacttggatattattggttattggtctagtggaataagccattaccgatttgagtacaacagtggtgtatttagatacttgctcctaattttctgttcttcaagaagggattgtacttcagaaaccagagatatcagggtagttttgattgagccataaattctaaattctgattgaaatgggtattgtaataaatggcataatcttttatttaatctagccaattgtgccctgtccagaggaactggacatttcttccttatgttccatttattcagcaactattcgttgtacccctgctgatggctaggctctttgctactgtggaaggcatcgttggggcagagcagacagcattttacctcctgggagactggcagatttttgaagcctttgttgcagatatagattttcacggtcaccactcttgccctttaatgtaatttaaatttttttttttttttttttgacacgggattttgctatgtttcctaggctggattcaaactcctgagttcaaacctcagcctcccaagtagccgggaaaacaggcctcttgtgctttaaagcagtgattctctgtctttaaaccttgtaactatgctgtgtggtggaaattttacttccccgtttaaagccaagatctctaaggccaagaattttttttttttttttttttgagatacagtctcgctctgtcacccaggctggagtgtagtggtgcgatcttggctcactgcaagctcggcctcccgggttcacaccattctcccgcttcagcctcccgagtagctgggactacaggtgcctgccacgatgcccggctaatttttttgtatttttagtagagtcagggtttcaccatgttagccaggatggtctcgatttcctgacctcatgatctgcccaccttggcggcaccccccgccccccgccccccgccccccacaaagtgctgggaatacaggccaccatgcgtggccgaaaaaaatttttttaattggcctgggctgggcgcaatggctcatgcctataatcccagcaccttgggaggccgaggcaggcggataacgaggtcaggagattaaggccatcctggctaacacggtgaaaccccatctgtactaaagatacaaaaattagccaggtgtggtggcatgcgcctgtaatcctagctacacaggaggctgaggcaggagaatcgcttgaacctaggaggcggaggttgcagtgagctgagattgtgccactgcactccagcctgggcaacagagcgaaacttcgtctcaaaaaaagaataaaataaattgtcctgggtcacataactggttaagtgatgaaatcagaatttggacctagataggccaggatatttctgctacactcatgtcaaaattacactttttattttctttataaatacacacaaattcatttcaacctgtgttcccttgtaaatgcatatacctttgatataggcatatattcatctattattttacactgtgcatttctgaatttttagaatttttacttgaagtgatcaggctggcgctgtggctcacgcctgtaatcccagcactttgggaggctgaggtgagcagatcacctgaggtcaggagttagagaccagcctggccaacatggtgaaaccccgtcttcactaaaaatacaaaaaaattagctaggcatggtggcgcgtgcccataatcccagctactcaggtggccaaggcaggggaattgcttggacctgggatgcggaggttgcagtgagctgagattgcgccactgcactccagcctggcgacaagagcgagactccgtctcaaaaaaaaaaaatagaaaaatgatcgggggtccacaaataagagtaatgatcaagggtcagcaaattggggccaaaaatagcctgttttcctgttttctacacaaaagttttattaggcacagcccatcccatttgtttaaaaattgtctatggatgttttcatgttttggaagtagagttgaggatcgcaaaagagattgtgttgcctgcaaaactgaaaacatttactatctggccttttcagtaaaccatttgctaacccctgattctcactataagacggtgactgtgaagttctttctatttcacatactgccatatcaagttgatttcttttgaggtagggtttgtttttttttggttagagatagactagtatagtgtttgagagaatttttatgaccttgggccagttaagtaacctgttttttatgtgtgtagtgtagatggtaatgttatcttgcatgtttcttgtaagaatgactttaggtaacttatgttaaacgcttaccatcatgcccagtaagtgttcaatttacaaactcaagctgtccagattcaaatctttgccttacaagctactaactgtgtaaatttgtataaatcaaataaccttgaatcctcattgcttctttttgtaaaatagggattaataagacctatccaatatttaactattttgtgaggattaaattaattaatttataggaaacactttgcataattcctggtatacagtaactgctcaattaaccttagttgctctcttagttatggttatatcatcattccgatcctccattgcatttgaaacattagcaaactaatgtttactactaatgaggaatgttaaaggtaaaccaataagttgacttttaattataaaaggcataaatgtaacctatccatatctattggtataataaagctgatatttagagagaacattatgttatgattaaaagaaacatttcttgcttaaattttttttgtgtgaatatacactgtatattgaaatatctgcacttaaattttaaatccagctgaaaattggataagatagtattagatgccactgcatttcaagatagagttttatttcttgcaggtattttaagccttgtgggagttcttctgttaagtgaacagatagagacactgatacagatggctctttcaccgtctcatgtgatgataaaagctaaaaggtttgatccgaatattgcttatattgggctaagtgattgaccttggcagaattaaattatttttcttcttctggtgacaattaatctgggagaagtaccatttgatttattgctatacatttcaccaatatccacaaggcacttgtaggtaccagacatggcattggttgctgggggcacagagataggaacaaagtggcttgctcaggttgcttctagccatatctgcattgtccttgagagggatgagtctctcaggcctgcctaggaaggaattttggcagcatggagaagagaaagtgctcagcccggaacaaaagttttcacctactatgttgcagagaagttggcgtatcagtaattataaaggaagaatagggatttactgggtgatagagcaccaaatagaatgaatgcaatacatacttgaagtaaatcagagtagcttgtattgatctcaaggggagaagaaacaaagcttagcttaattctcatgcctctgttgttacttgtttgtaatggacatgacacttacaaggtatcctataattcactaacgggatttttacttatgattaatatttaactctccacaaagcttggggtaaactgtgaacttaacttgctgtgaacccgaacatgaactcacatacttcagttggaggcctcagtagtagcatgctgtacaaaaatgaaactaaagctccagggagtatttgggaacagggcaaaagggtaatggctcctccttatagagcaagcctcaggcctttacctttgtgttttgaagatggagaggatgcacttctactctcgcccgggttgtagcatgcttgctaatgatgtcaagagaactagtgtcagcactgaccatagatgtgacaggtaacagcctgttattttgtgccccatgtcatggcagccattgattccgaggtgtttgatacacactttgatagaggcagagtgaagcaggacatggacaagcatctttccgtgtagtttaatggtctcaatctagaaagcccactcagataattaggttgcttaaaatgtgatgagactagggaatagagccatatagaagtgtgtgtgagagagaattcagtggtttagtatattcacaaagatacacatttgacaccagcctgggcaacatagtgagaacctggctttaccaattaaaaaaaaatagaatagcagaagtaatcagtgaaaggcattttaatacaattatatctagatttattaaaaataaaattttagtccaatttaattaaaggccagaaactagatttttaaagaatattagtctttctcatattttccccaaatcagttgctttaaaaaaaaaaaagtgtgcagatgcctcaggcacaataactgtactcaactcaagaatttgcaattaagaaaaaaaaaaatcaaacctcaaagaagaaatccagcaactcagaggttcaggttcatttaaacatgcatacatttacatgggcacactttttttgttttgttttgtttttaagatggagtttttgtttgtcgcccaggctggagtgcaatggcgcgatctcggctcactgcaacctctgcctcccgggttcaagtgagtctcctctctcagcctcctgagtagctgggattacaggcgcacacaaccgcgcctggctaactgttgtatttttagtagagacaggttttcaccatgttggccaggctggtcttgaactcctgacctcaggtgatccacctgccttggcctcctaaagtgctagcattacaggtgtgagccactgcaccagctgggtgcacctttttgtttgtttgttttgttttgttttgttttgttttgttttgttttgttgacatggagtctcagtcacccaggctgggattcagtggcacgatcttggctcactgcaacctccgtctcccaggttcaagcaattctcaattctcctgcctcagcttcccaagtagctgggactacaggtgtgtgcaaccacacctggctaatttttgtatttttggtagagatgggtttcaccacgttggccagactggtctcgaacttctgacctcaggtgattcacccaccttggcctcccaaagtgctgggttactggtttgagccaccacacccaaccgggcacacgtttttagccaagccataggtctgattaagtacagtcagattccttgagcaggttacaaagctgtggatttgaatggagatctttagttcccttgcagaacaatgagtttccaaaagcagagtggcttacagcctaaccagctgcttctctcagcctttaaccattttgccctcctgaaaattcatctttggtttccaaccacctcttccaatatgcctgactttttgtgattctgttagtagaagagtaaaaagtcaaggggaggcaagaatgaatgaatctcatataaaaatgatgctcaagagaatcccttaattttcaagacagcagcccaaattgtaaacattgagacttttacagtgttaaaaaaaaaaaagtgtttacaggccaggcatggtatctcacacctgttatcccagcactttgggaagctgaggcaggatgatcgcctgaccccaggagtttgcaagcagcctgggccccatagggagaccaaaaaaaaaaattgttgttttggctgtagtgtcacaggcttatagtcccagctactcaggaggctgaggtgggagggtcgctggagcccaggtgaggtcaagcctgcagtgagccgtgatcacaccaccacactccagccttggtgacagtgagaccctgtccaaaaaaaaaaaagattaaggcagaggaaatgttaaaggttacgctatatttagttgataataatggtaagactgttcaggtgttttaactatgagagtagggttgcctctttcttaaatttatatatgttcttattgggtataatttctagacagaatatgcaagtatcacagaatatggatggcaattttatgttgcttgcacgtgactttaggttcttatgtttcatgataggagcaaagaaaagtcttgcttgccaattcttatgattgcatctgttctggaaatttactagcatttgttacccaggatttctgaagtgctggtgactgctgcccagtagtcttggtgggcaaagttactaaaatgcatcacgaatccttctggtgtttgcttgggctatggcagggtttctggaccttagtactattgatgttttgggccagataattgttgcggatgattgtcctgtgcattgtaggatgtttagctgcatcactagcctctactcgatgccagcagcacccccaagtgatgacaatcaaaaatgtcccctgggaggagtaggggatagactctctctggttgcaaaacactgggctatggtgttgagatctgcagtgatgagcagctttagatatgtgaacagaagcccaggcgtggtggctcacacttgtaaccccagcactttgggaggctgaggtgggcggattacttgagatcaggagtttgaggccaacctggccaacatggtgaaaccccgtctctactaaaaatataaaaattagccgggcatgatgatgggtgcctataatcccagctacttgggaggctgaggcaaagaaatcacttgaacctgggaggttgaggttgcagtgagctgagatcgtgccattgcactccagtctcggcagacagactgagatgccgtctcaaaaataaataaataaaaataaaaaagtgaacagagaaatacccgtgcaatactgtgtctcatcccccaaagacggagtcttgctgtcgcccaggctggagtgcagtgacacgatctcagttcactgcaatctctgcctccatggttcaagcgattcacctgcctctgtctccgagtacctgggattacaggtgtgcctcaccaagaccagctaagttttgtgtgttttttttgttttgttgttttttgcttttttttttttttttttttttgagacgaagtctcactctgtcacccaggctggaaggcagtggcacagtcttggctcactgcaacctctgctgcccaggttcaagcgattctcttgcctcagcctcccaagtagctgggattacaggcacctgccactgcgcccggctaatatattttttttttttgtagttttagtagagacagggtttcaccatgttagccaggctgatcttgaactgctgacctcaagtgatccatccatctcggcctcccaaagtgctgggtttacaggcatgagccaccaagcccggctggtctcattttaatgtaagctctaacttctgtatcactgctttgcacattgtagataaccagtgaacattttttattgtataagaaaaagtaaaataaacaaaaatatgccaaagcaaatatgataaatacacatttagtaaggtaaaagcaagtatttgataaaatgtgtaatgtagtctagtagctttatttagaaacagaaaacaacataaaatgttgacttgaaacattgcgtatgcatatttgccatgtagacagtgagatatggaggtaaactgctttcctagttttgttttgtttttttttttttttgttcaaaaggaattcactctccccttgtccactgttataaaatagcaaatggtgattagcatctgtgctgtaaccagagacactgctgttcccagctggaatctgtaggttctttgcctgctagagattgtgacaagaagccagttaacatggagaggtgtacatgtcagtcttccccagaaaaggacatgaaacagtaggaccatccttccaacccatgacctacatctagaggcattctttttttctttttttttttttaaaccggaacagaaatatcatctaattctttctttacagagaagtggtataaggaagtacattctggccaggcacgatggctcatgctgtaatcccagcactttgggaggccgaggtgggtgcatcacctgaggtcaggagtttgagaccagcctggccaacatggtgaaacccctcgctactaaaaatacaaaaattagccgggcgtggtggcacacacctgtggtcccagctactcgggaggctgaagcaggagaatcgcttgaacccgggagacggaggttgcagtaagccgagttcactccattgtactctagcctgggtgacagagcgagattcgtctcaaaaaaaaaaaaagaaaagaaaagaaaaaggaagtatattctaagcccttgaattgatcttggctttcttcattatttttacaagtaaaaataaaaactttgatatttctgatgttctgggatattataggaatgataccacttgaattcagctttctaagaagtctggtatttcaatagtcttaatatgagtaagaaaattatgatcttggtactggatctaaggcagaggtatcgaagctgttttaatgttgcttgagataggacagaacttcagagtaaaataaatgtgtatagacaatctgttcaatctgttcaaattaagttgttgagctgtatatttgaatcttaagactactaattttgttgtatctgtcttttcccaaatatatgtgtacttcttttaataagccaaaacctatgcaacttttactaattcttccctaactacttcttttggaaaatgattaaatcttatgtctcacgttttgacatatctattgcatttaaaagataaggttgatcatgctgcttctcaaactgagatatccattcgagttatccaaggcccttggaaaacaatcgttgttgagtctgtatggggggcctgagtcccaggtggtgttgactctgctggtccatgatcctattttgagtagtagactctagtagcgtctcctgccttccatatggtgcagatttgcagcattgagacaggaagtaagaaactgaaaaggaaaaccattcttacctttggtgttattgttcttggtatattacagataccaacaagtatgaggcaatcctgagacatctacctactgagcttttctttccttaaattcacacctcaagaccaaggaaaccgaaaaactcttacagtctccctacatgtgttcacttgtgcccctatttcctgtcattaacatggtagtgtagccaactcctgctagcctgtaaaagctaattattacagtatagaggaattttgtaagccatagccattagtagcttgaaataccaatggtgggagtatttataccatggcagttggcatacactgtaactcaagagtgttctatttgtttgtttttctagacagtgccagtttcccagcatactcctgtctctcattcagtaagaaaaagcacttccccttattttccaatacaggacatgatatcccgagttttgagcttcttgttaatagcctgttgcacgctaaccacgcagctcagtgaagagcaagtttattcccataacaaacaggaaacaaaggttgaggaaaaaccacagtggtacccttttgtgagtgttccctaacaccgtcacgggagtcctgattagtctaaatactttacaagtaaatctccttcaggtggcattttataaacaatctttcatcatggagagatgagaattgggtcaggtataattagaatgacagatgtattggctagcctgagagaattaacgcaattcagtaaaaaggctagccaactgcggatatcttctagttacttccgtgacaaattagcaccatcctcttgtactgaagcagtgctttcattagcatgcacagctgtttgcatcatctttgtttgtatttcaatccatatttggagcttaagtgagatttgtcataagacttcagttcaagcttgcttgcctaattttacatgcttctatttagtaaaatatgattactaggtcataaatatttgataatttattgccttattagagtaattttctaaacatgttttttgacgactgcttgccactacgtacaagcacttgaaaaatgttcttttctattaaaagtacatggttccagaattgggaaaatcacgttcttaaaaaataaccagttttctattgtgttggcttttaaaattttttcatcagtagaatcaaatgcaaatattgtctgcttatttttcaacagaatacaagtttgattttaataacttaggctcatgaaatgtcaccacgtagtaatacttagaattacagcaataacttaggctaaaaaaataaagttgttatgaactacattgagctcagacagatatatgtattatgtaaacatttatataaaatgtatataaattgtatattgtattatataattatatattgtaatatatagtatataatatataatttataaatataatacataaattatatttataaattataaagtttttatataatatattataatctaatatattataattatatttataaattataacgtttatttgaaatattgaagttttgtatacttagtggattttaatatttatgtcgttttcattttattccactgttacattaaggaagtaacttattacaaaaataaattatatttgtcttacatttgccctttttactctacttaaaattggagaaaaagagttcaagatagggaatttctgtcagaaaggagaaatagttgtattatgtgaagtttaagtagatattcttgtagagtatggagaaaataatgctataaaatgttgccttttaaaaaaaagttcagaaaatatagttcctagctctctctaaatgactagtttgattgtgactgctttcccaaaatttgtaaatttaaaatttatacatcacatggaatatagttttatttcacatacattccagtaggctgagaatacttgaaattcaatgattaaaaatgaaataataataaccagctttgctttattctaaaaccagctttattctttatttaccactttatttacagcgaattatttgctaatctgttaactttgcttcataagaaggcattataattatcgtacatttgaaagtggagattttctccccattctggttgccagtttcacaactgtgttcattctaaatttattaaaatatgtaaaatcagctttctaaccttggttgtccacaaagaatttcactccaatttgaaatatctattcagaactaattttttgtggttgagcattattttttgaacaatgaattgcataatcattttgtataatccagggagctctggcttagattctgtattattttgtgttatactgatttttagaaaatggaatgtagcgttgacacgagcacaaatctcagcaagggcctaccttacaaagataaaatgcgtggagttttattagaagcacatgattttgctttgtgtttcgtatacaccagcatttcagtgtagtaaatggcattttgtcttgaagagtgagcagagttgttacaaaagaaggcataatgcttccttgccagcagaattcagataagtgaatatcagaaaagctatttgtgatcttgaaagtgtaagaaattcaacatcaataaaggattgtggttccttagatagccatgtaagtctttgcctatgtttctaacatttctctttaggaaatattcttgcttttatttttctgaacaaattttctccattattatctctgatatttactttgaacagaaaggtggattggaaatcaaaaaataagtttgatttcaaaaatgatttcaaaatgttagttttctcagtattttacattttgagaagagaacaaagaaggcagatgaagagttttttgttttttcttaaatttgttttcttttcaactttatttttaattgacataataattacatatagtatacattttgaagatacggttttaattttcacaggaatcttatttgggtttagttatataaggtctaattttgcatcctctacatttagtggctgatttataaatttccactgagtgataatagtaattaatgtgaaacaggttttttgctgatgtttttagaagtttcagtagattaggaaggaagaaattatgctattgagaaaaatagaaaatgtaaacataagcatttgaactctctcttgagatatttttatcttccatgaaactagatgcggcttattgaagatgtgtttcaggtctcagtgctctaaaactcttctacttggtgagcatcttgattggttagatctcttactaatatcccattgctagagagggatgtaaaggaaattttctcaaactgagatttccaaatcttccaatctctgagtcaagtaaagagacaaggttagaactcttaggcaaactgaaaaatcaatattcctatattatcattatttttttctttttttgacaccaagtctcactctgtcgcccaggctggagtgcagtggcactattttggctcactgcaatgtacgcttcccaggttcaagtgattccagtgcttcggcctcgcgagtaggtgagattatatgtgcacgccaccatgcccagctaatttttgtatttttagtagagacagggtttcgccatgttgactacgttggtcttgaactcctgacctcaggtgatctgcccacctcggcctcccaaagtgctgggattacaggcttgagccaccatgcctggcttcctatattcatttttttatgtgggctttttaaaatcttttcaatagcaaagacttgacaccaacccaaatgtccatcaatgatagactggattaagaaaatgtggcacatatacaccatgaaatactatgcagccataaaaaaggatgagttcacgtcctttgtagggacatggatgaagctggaaaccatcattctcagcagactatcacaaggacagaaaaccaaactctgcatgttctcactcataggtggaaattgaacaatgagaacacttggacacagggcggggaacatcacacaccagggcctgttgggggggtggggggttgggggagggaaagcatcaggagaaatacctaatgtaaatgacgagtttatgggtgcagcaaacaacatggcacatgtatacctatgtaacaaacctgcacgttgtgcacatgtaccctagaacttaaagtataataaaaaagaaaaaaaattaaaaatcttttctttgagacaattgtagatttacatgcagttgaaagaattaatagaggccgggcgcggtgcctcacgcctgtaatcccagcactttgggaggccaaggcaggcggatcatgaggtcaggagatcgagaccatcctggctaacacagagaaaccccgtgtctactaaaaaatcgaaaaaaattagccggtgtgtggcgggtgcttgtaatcccagctactcaggaggctgaggcaggagaatggcgtgaacctgggaggcggagcttggcgaagcctgcagtgagtggagatagtgccactgcattccagcctgggcaacagagcgagactctgtctcaaaaaaaaaaaaaaaaaaaaaaaaagaattaatacaaagagaccctgcatagtcttcactcagtacagtatcacaactattaaattgacattaatcccttaacactgctttaacccaagtctatgctgctgcttctccgtgttcacttctgagaggcactggccatttcttgtgtgcttattcatactttgtgtaaaagcattagcatcatacatcgctggtgctgaccctaccctcagtcccagcttctcccagagtaggctaagattctcttttctactacatggaaaattgttctggaataataaagggttagcaaaaaagtcagagaaaacaaacagttgcattccctttccctgtagtagagtaggaatataattatgagtgatagaggatacgttccattcctttcccagtcctctccgaagtcagcttcactgctgtaggaagttgctgttctcattatttccctgagggaaagtgttgggaagtgagagttgaggtgatggggaatcagggttgctgacaattgggggaattataacgagaagctctttttcaccaggagaggggttgcatgttaagagaaggcctatctgctcatcctccatgtcagcagatgagaaccagttggacaaggtagctgtctcttagagattgagaagtaacaaaagcacactgtcagtcctgttcttccagcctcacgtacatcttctccatacattatgtatttgacattaaattaacatacactgttacacccattcctgaccgcattatctcaggtagccttttgtatttgagtattgtgggatctgttgctattgcccatgatgcccacttggactccaccaaggcagtgaaactcttgggggccgttcaaagtcaagagtgccaactgcccctaacaggattgggagaaccaaccaacactccccgaatagggactaactcactcttttcttggcctttatgaaaggaaggagttaaggctcttacagctggagactccagcaagagttgtaggctcaacgtgtagcttatactatttacttaattaacatgtaaatggattttgagttctgaatgcttgttctagttgattagggctcatttagcctggcttctacgaattagctataacaaatggtttcatagctgttatagaatgaggcagaagaaaataaaatgaatgtagcattatgtttaattagtggtataggaaaatgttaatataatgccatttagattctggactggggagattgtgcctttatcataagtaagaaattgttgctaggtttcacataagggcacatagttatcatgaatcatctccttcgatcatcattcttttatcccattacttgacttgcacccatccaaaattctaccacttttatttaatatatagactcataaagacaaggtttgtgcatctgcagagctgtgatgttcactgcgaggcccgtggcacacatctataagaagacacatatttggtactctaagatgatacttttttttaatgccaaaatgtgagggtcagcataaattgccaaggcatggtaaattttgttgccaatgctcccgtgactatggggtgaagggattctgtgcctcccttggtagcaatgaccacggtgcttgcaatcccagtgccaattcccggcacagtgcaggctctggaggcactgctgccttgcagtcttattggaattaacactgcctgagtaagagattaataatgggtattgttgtgtcttagaaacgttaaagagcatgtgacatgaatatgtacacattggtgaaggagatacagagaaggaaagcaaagtgaagctgtagatgtttgttacaactgaaggtaagctctgggagcagagaccactgctggctatagttgatgggatccacaatgtcaatacaaatggggactaactattgttttacttccctatacacgttgctctttcagtagatgcaataaagtactggtaaaaccagaggtggctaccatcacgatgatgtcaacaggagggacagtcagcactaagcccagaaggtgtcaaacactccgcaggagaaatgcgccatgcaacggacatgaagatgatctgacactcttcacgtggttttcagatggaaacgtggctacgaaagcatcaacctcattatcatccatcattaaggccatctcactcagtactgctgctttcaaagtccacgctcccaaagcaaattggatttctgtacacaatactcttacaggatgaaacccaaccaacttgttgacgtaagtatcccatctacttcgcaattttatttatcttccaaaattaaaggactggcaccctgatttattaaaagtgaattgggtctagggaccatatcccctctgagttactgacagagcagcttctggcctgtgaagctcaaagccatgcctagatgtgatggatccttgtctttgattggctaattagaatcaatctgttgaaggaccagtggcagtggctcacgcctgtaatcccagcacttagagaggctgaggcaggtgtatcacttgaggccaggagttcaagaccagcctggcctacctggtgaaaccccatctctactaaaaataccaaaaaattagccaggcgtgctggtacaagggtaatcccagctacttgggaggctgaggcgcaagaatcacttgaactcaggaggtagaggttgcagtgagccaagattgtgccactgggcggcagtgcaagaccctgtctcataaaaagaaaaaaagaatctgttgaatattcctaacttggaagtaatgggtgatgcgtggctttcatcttttagaaaggtgttttttcctctgtcagtaaaactaagaagacatctgtgtgtgctaaggcgtcagtctagcaagggcagggcacaaacccagagagagaattgggctgttgtttcacttccaataaaaatgggatatacatgggaggtagagttataattctactcaggattgactttatacatgcaattggatgggtcactgattgactttgaggcaatcagggatgagtgaaactgatcttggggagggtggcaagacatgttgacaggtaagatgtgttttaatgtataacagtgcgtggtgtgtattaatcagttggagttgattgactgcgttttattgtttggaacattcctgcccaagggtcaggtaaatatacaaaatatacaaataatacagatttttaatacataaatatcaattaagtagcataattaaataatacattgttatagttgtacttaatgtgtatgtaaatatatacaaataatacagatttttaatatataaatatcaattaaatagcagaattaataatacgttgttatagatgtacttcatgcatatgtaattaaattattaatgtataatatataaatacatattttaatatacaaataaaatggtcttaaatcagagttaatttaagaccatttatattagtacatatcttaatatacaaatgaatggtcttaagttaatgtcattgagtataagtcacatttacagatatgacatgtgtttccagataaagtcaatggacagacagcttccaacactggaaaacattcaaaatatatgcaattaattttatatttgagttaaggcaatcatttattaaggaaagcaatcagatgtttgtgagggcttaaactttcgcttcataaccaaagcagtttccttacatgaaagttgacttcttaaaaagagaagtttattttttataatggagaattgttgtgatgtgcagataccttccgtcatttcatactcatctaaaagcagccaaatgatcttttcacctttggccggaatccttttattgctaccgagtcctgcactcattaaaccagatgacagtgcatgctctgagaggtgtaaatctctagtcctggtggccagttaaattcctcagtaaatgtttggtagatgctgcctaataaaccagtccaggttgccactgggaggattaaaagaagtaaacgtgtatacatgaacagagagacagtgccttttcatgctaaatgtggttccccacatctcctctgattagaggtgtgctctgaacaagccgagacggggccgtgccgagcaatgatctcccgctggtactttgatgtgactgaagggaagtgtgccccattcttttacggcggatgtggcggcaaccggaacaactttgacacagaagagtactgcatggccgtgtgtggcagcgccagtaagtggacccttcttcgagcctggccacctttcgtctctctcgccactgactctgctttttgtaacagattgattttcctggttcttgggaatgggcctgttgctaccactaaccacatttctgtccacttctctaattgctcagagtctccgcagtatgttcaatcatgagcacacctctccgtctttccctgataaagcatggccatggatgtgttctcttcctagctgtagcacatatgtcttgcaatccagagggacttttgagtgcttctcttttaaacaaagctggagtggctgttttgtcttctgcagccagccgtttctgcaaatgcatacttatgtgtttgtccgtgtacatatgtgttcatgtttatgcatgtgcactacctgtgcagatactgtctaccactggaagcctggctgatgcagcttgagttgcattgataaggtgtatggctgtgatgaatacctttaagttggttcataacatgtcttttattgtgctgatgagggaatgtgattgaattgagctcatgcatctcaaatgccggagggtagaagtgcccgtcttgccccctccgagctcagcacacagacatttgccaggtcaaacttctgcttcttctcttgaaagtagaagaaaacttttgacttaacgtgagaaactttcaatgacataaggctcgaggaacataattttattttttttgtttttttaaagacagggtctcattctgtctcacaggctggagtgcaatggcgtgatcttggctcactgcaacctccgcctcccgggttcaagtgattctcctgcctcagcctccccagcagctaggatcacaggcacatgccactgcgcccggctaattttttgtatttttggtagagacaaggcttcaccatgttgaccaggctggtctcgaactcctgacctcaagtgatccacctgccttggccatccaaagtgctgggattacaggcgtgagccactgcaccccgccagaacataattttcaaagtctttctcttgaacattaagcttttcataattccgggggataaaaatatgaagtcatgatgacttaagtgcatgatgaaattttccccaaagaggtaattctcaggaggtccagtaccagatgtgagacttccatgtcgttaacagacttccaagtgaaattcccaattgtgcttatttatttatttatttatttatttgttgttgttgttcatgagtaggaagtatgaactactcaagaagtaattattcagctcagcttgataactaaaaatgaaactcaataactgtgtattacttttttgagagactcctgcctaattctccgctgtgttgcaagggtggcagccacatttcctgcctgagattcctagggattatataaattgttttgcagcaagatcttaggattaagcaaaacaacagaagggcctgcaccattaatacccccactgtaaaggagcccaggatctaagaggaatgtaatggaaaagctcctgttggtctcctgccatcgccagtgaatgagatgactgcttcagtcccatgtgtgaacaggtgtaggaactgataacctcaagggctttttttttttttttttctggctctgattggatgattgcagcttctggctcaaaggactcccttcttcagtttcaaacaaagcagtcaattaggtcaggtattgcgaacacaatggagaattctgttgcctgcagcctttggaacaaaggccttttgttacagtgattctcactggtttagccggtgggagaggtttcctggcagatttgcaacttttttctccctttccctgggtggattcattttctgaaatatcatgtatagtttttggtaataagagatttatttggttttaattattagcagtgatgaatttgcttcaagagattaaaattctctccacctcaccccagtactgccatcccttcacctaacactctctccctttgatcagtttgggctgggagtgaccagtgggcacctgtccaggtgtcctgggtggcacacagtttgctgagggttttgcaaaaggtcgatgctcccaacagagatgtattagatgaggctagctatgcctgattttagaggggaaaggtgacagaataatgtatgaagaaggcaaaggctgaagatcagttagatgggtggacaagaataagtagagagtataagcctcagcaaacagccagagccgagagccacatgctgtcctatgaatgagtgaaataaatggagtttttgtgaaaaaatgcatcgaagggaattggggatatttggcacaaaaggagcaagaaatcctcttctgttaagaaacctgttgttactcggatatactatcagagacaaaatatccagcattctcaaatgttaacttcttacgaaaatagatcttatgtttatatgttcattttggttttgttggagggaccaaacctaagtgagtgattttgtttgttaggttgtttttttgtcagtggactcgtgcatttcagccatcattcccatgtttctctttttgtttttagttatgttctcttattttttccatagtgtcccaaagtttactcaagactacccaggaacctcttgcccgagatcctgttaaacgtacgttgtcattcacctgagggaagggaagaggggaggaggatgctgcttggttcacataactccagcatcatcaccttctttgcatggttttgtgtttcttgaacacctgtcttagtaaaatgtttcttcccattaccttgcttgtaattacatctgattttgccagacagcttgagatgttgggctaagaacatcattgactaagtttcttctatttctgaccaatttcctttttatttagtctggttttattgaatattatatggacaacatcattgtattgtatttgccattactattttatttcctaaaagctatcagtgtaactgagagcaggcttagcctctcactgcttttgcagaactgaagaacaagggctaggtgcagtggaaggaaagtgactttacttagcaaagctagcaatggggaaatggtccaggctcctgcctcaaagcaaccatctcaaattttggattaaaaaacaaaggcttaaaaaggggagcttggaatgcagggcatgaaggaggggtgaggaggtgctgctatacaggacttgttccaaagacttgagttattatccagttcggtaagtgggctggcgcatcccgcacaatcgggttgtaaattaactgcagccttgaggtgatctcctgatgagggagaattctgaaggtgcctaagtcagtcagtggaacttctaagcaagcattaataattttaataataattataagcgtaattagataatggaagcgctgtgcagggagtgcctggtgggaagaaagagagcaaaggttaccatttcattactaaaactggaaggaaaagaaaggaagaaagatctttaaaatagagtactcggttacatcaagatgccatgatttaacaagagactataatacataagtaacttgtttcctcagaaaaagtacttaatattcatggtattgtagtacatggactaattcgtacacgcagatttcaatttatgtgtgttataagacccggtttcaactttagacatgaagggtcacttttagacattaggaacccctctttctcctctcccagaaggcataatggtaggttagaggtgctcaccttttgactaggaagtagagaaagagcctcctataaagaaatgcattgtccagccactgcaggccttacttacagtgtcttatgttttgtttttatttcagttgtaatatcagacgagtttagttttaaaatgtggttttagtactcatatttgaatttggattccatccagaaatagatttatccagtgttaggttagggatgatatatgccatttatgcttatgattgctggaagaagaggcacaatttcagttgtaacttagatattttataattagcatttgtgtacattatcctgaaaaaaaaaaaccctcatctcaaaactgatgaagccagttatcttttttaaagatgataaattatagatgaaggattaggtattttaaaaaagactgcatcctaaactataaagttttttaatggcctccataaaatattcagaataattcacattatgtataacttttgaaggatgtggtttgtactgctgcaacataaacgtttcttttgctgttgtgaaaaaagcatttttctctaaaaacactgtaagtacagcaagtgggttgacagactaggaaaaagctctagctattccactatagtgttgacataggtacgcatgttgagttgcattgtaccgagcattttcacagatcatttaatttttcttcagaacactttgtgggcattttcctcattccttttgtacatacgagaaaaaatgaggcttcaagagcttagtgacttgtcccaagccatcgaacatggcaggaccaggctttgaaacccaaaatgacgttttggccgcactccacaccaaatggctaagcattggttctgacattgttttgccggttagtgaaatcacatttgcgattcagaagcacattttaagaatacagaaaacagtgaaaagaggatgaagaatgttaacattttttcctaaatgccatgaatagagcacgcatcagtaaattaaatgtctttcccattcttttataaaacagtgattatttttctcttgtttcattttagcatttataagaattctatttttccatttttaataactgatggaaacaagcatcattgtctgataaatttattttcatgctgtacacgtaactaccactttcatcatccactgttccaaacagatactgaaagtctcttttgtaattttctccttcccagtaattttctccatctacttgcagtgtatttgggatcctgacacctttccattctaggaggatgaagtgctttgggcagctatattttcttgtctgcctacagagactattcaatcacagcaagtgaagggttttgcagtgctagtacaaacagacaaggaaaaaaacatataatttctagttatttatagcctgtgcagctatgtggtcttatttatagcaaactgcacatttgatttgaaaaagtcatggtcatctggaggtcaaattcagatggcagactcaattcagagaaaaggagctgaactagaaggtaagcaagcctgttagactgggcaacttggacttgactttgctccttcaacaatctagagccagttggatgatatttctgcacaaaggtggttggttttacaggttgctcagtctaagctgcttctagtcaaataacaaatgtgaaaggagatagaaaaagctcttcagttgaactgataaaagattacacttagggagaaaatgtatgatggtttgcattataaaaacaataatttgccataaatcaggcatttctaggtttcaaacttttgtcataaaaaccaattttgagcattgcaattttagggacatattttattgttgttattttaaataaaaatctaaaccacaaatataaggctgagagctttcattttattcgtgaacataggaattcaaatcattaaaaaaaaaccctttctcatttgggataaagaatcttacgagagctgagttaatttctgacattagttttgcacctgcccatttgggtttaggacagtgcaaaaggtttcacatttaatcttcaaaatatagtatttgtagacaataaaattatataaatatttgtggattcatttatattttaaatatgagagtgtgaccattttttctggtgctgtctccatcagactgcatcccaaaaggcaaacagaccaactccttaatggcatttaatctctcaaagagcatcatgccaatttttagtcagcagattgcaccatgtgatctggccaaagtgtgtcccatctcaggctccttcatttgcgctgacatgtggtacaaacaactaaaccaaggtttctcaacctcagcactattaacattttgattcaaataattaatttttaggagtctgtcctaggcatatgggtgtttagcagtacccctgacccctacccactaaatgccattaacacaactccagctgtgataactaaaaatgtctctagacattgctaaatgtgcccagggggtcacattctggttgagaatcctgttctagagtagtagtttccccacatctgactcagagatagaactctcctggtgtaaacacgtgtactttccacaaatttgggggcatgttgaaatgttagaatgtcagcatcatccaattctcgacagatgtttgaaattgaatttgttagactattgtccaagctctcaatatttgcaaggtaaagtggaagttgctgttgctgtcctgactatagtattgaaggtctcgtagttttcctgctctaatgtaagctactgtggcagcagaagagaaaccagcaaatcccttagtttgaagtcattggttcacctatgcaccacccctttctcctctctgtttcatcttagtttcctagaatcccaggatatgctggaggacaaccatctgtagagatgtcctatagtcttgctacacaggttatttgtactttaggattatgtttgatggccttatagtttgtgcagaggtgtaggcctgaccccatgcaggattgagggagggaaaaagattgatttctaggcacatcagaatggtccagatgacatgaaacagactggtacacttacagagaatatgaaaagaattggaacttaacaagtcaggccccaagttccatccccaggttccaagtttgttgccgcagaagctcataattttcaaatcgtagaaaactcacaccacgcagcctttcaatggaatatgccaccttaaccccagggtcgttgtaaagacaggagccataagacagaagtctgaatgcctaggccatttaatctttggccaaatttgaactattgttcttaatcacactattcttgttcttttcactgtgcagtagcaaatgttagttcccattagcacattctgcaataccattggaactaaaactgccaaattagattaggcaacctgggattacactttgctccccaaccaacctagggagggagaacaattttaaagcattaaaagatgtgatggtgaattaaactacctgtcacgtcagtgccagtatattctatcagattaacaagtgtgaaaagctaaatctttggtatctggaaatgcttagataggaagaatggctttttcttcaaagccataataattagagatgaccctaaaattgaaaggaactggattgcttagcaactcagcattttttaaaaagaagggccatctactttgaatacaggttaaatatctcttctctaaaatgggaccagaagtgcttcagattttggatttcggaatattgatgtattcatgatgaaataacatgaaattcatttatgtttcatgtacaccttatacaaaagtctgaagataattttatacaatttttttttttttttgagatggagtctcgctctgttgcccaggctggagtgcagtggcgtgatctcggctcactgcaacctctgcctcctgggttcaagagatccccctgtctcagcctcccaagtagctggaatgaatgacaggcgcctgccaccacacacagctaatttttgtgttttttagtagagatagggtttcaccatgttggccaggctggtcttgaactcctgacctgaagtgatccaccagcttcggcctcccgaagtacttcgattacacgtgtgagccaccacgcttggcctatacagtatttttgataattttgttcatgaaacaaagtttctgtacgttgcactgtgagagaacaaaggtgttgctatcccagccaccatgatgtcatgtcagtgctcaaaaattatcagattttggagcatttcagattctcagattagagatgttctacctgtggtaaaagaatgttcattatgtctctgctctgttgtttagctatttgccaaaagagggtaagtggatcgtttaataaagtggtcagcaaatatttttcatacaaggccagattatagatattttaggctttgtagatcatgcagtttgtcataactacttaactatgcagtggtagcatgaaagcaacaatagacaataagtaaacaaatagacaaggctgtgttccgataatactacttttataaaagtagccagcagctgggtgcagtggctcacgcctgtaatcccagcactttgggaggccgaggcgggcagatcacctgaggtcaggaattcgagaccagcctggccaacatggcgaaaccccatctctgctaaaaacacaaaaactagctgggcgtggtgatgggcgcctgtaatcccacctactcaggaggctgaggcaggagaatcacttgaacccgggaggcagaggttgcagtgagctgagatcacaccatcgcactccagcctgggggacaagagcgagacttcatctcaagggggaaaaaaaaggtagccagcaagctgatccttggtttaatacagcaggtttttttatttttatttttattttttttccaatagctttggggatacaagtggttttagttacggggatgaagtgtatagtggtgatgtctgagagtttagtgtccccatttcactgagtagtgtacattgtacccaatacgtagttttttatccctctcctccttcccactcttcctcattctgagtctccaatgtccattatgccactctatgcctttgcataatcatagcttagctcccaatttataagggaatacatactgtatttccattcctgattacttcacttagaataatggcctccacctccatccaagttgctgcaaaagacttttattttgtggtttttctggcctactagtattccgtggtatatatacaccacattttctttatccctcattggttgatgggcacttaggttggttccgtatctttgcagttgtgaactgtgcagcagttatttttgaccccaggatgtgcgaggccaggtattttgagagacaccagcaaaggaatctgagtactggctatcaatacctgataattttattaatgagttgagacccagatatgccgtagaggtaaataaccatataaaggaaatatagaagtgtaggagaagattgctctggaaggctggggtaaaatgaaatcagctttatccttaagacctccatagaggttaactgtaccatctccttttactgctacagtttatatgaaactggacaatattgaagattttgacttttcgaactcatctattgagtgttgagcagctatgacaggttatttctttatgtgcctccattaacgaagtcaagaatagcttctgacaaattgacaaaaaacaataacctaaggttaacccattctggacgccagttattgctattgcttcacatatattttttagattcaaacttgaggttgcttttaagttttagtgtgatgtgctgaatagagaatagatgttaataaaaaaataatgccagcattcgttccttcacattcagttcatatatttgaaaaaattcccatgtcagtatgtgtccatggacataaaaaagaaatgtagcttgactagagtaaacacatcatagattatatttttattaccttatgtccatgtgatgcattgatagtgttctccaccaactatgattgcactgactataaaattgtaatacaagggcatattagggggagaatgcctttgttttttcttttgttgttattttgtttttaagagagtctggtattacactggaggatcacaaactgtattttcttgttataaatggctcctctatcttggacttaatggttaggataaatatttgaatgtagaatgcgttaggagttttaactatttttgaaattaggaaaatggagagacactttttttttttttagagacactttttttttaagttataataagcatggcactcggaaagctctgccatgtttcaagattaaagtttcacatgaacgctaacaagtttatatttcactcatatataaatgatcctccttgtctcctttcctaaattatagccatctcaaatgacaacattgctgggtcggtatcaaatagcattttcaatgataaggcaatgatttatataggtcttaatttgttttaatcttctgttaccaaggctgtagagataaattgcttttctgctgatgaaaggagactaacccaattttcttgttagaatctaatattaatatatcgactgaatgccattcataagccttggtttagggaaacattcagccttctggcctgttggagatggccacggtcattgctgtttgaaggtgggtcatttcttcttttgtgtcctgagtccattgtgactgtaaaattatgggtcaccccagagcctgaggaaacaaatgcatatcaaaatgataggggcaatctttcacagtgcctttaattttgaccccacattcttatatgaatgtgaagtaccacattagtatgaatatgaaatggagtgctccgcaatgattacaaaatcagaactaaaatgagggaaatcagtgcatgtacagttcaacttaatggattatcctctaaggagtcttcagacaggctaggagagtgacgtctgcctcatcctgaagatattagcaggttttcccctgttttaaagtaacttcccttcaaatgctaacagttttctcagaggaaacacaggtatggaaaatgtttcgttggtgtcttggccccagtgatggaggagcattttgtgataggaacgttgggtgcagcatcgccatttatgaataaactgaaagctaacctgtgttacttcaccccagaaaacagagctctggcaggtattgagaatagatcacagtgtgaagtggcagtattgtgacaagcatgcgtgtatcagtattaaaattgaaatgagccctcacgcacatgtgaaagcagtttctcccgttttcatattcagttccctgaggtaatacagcattttggtgtgagagaaagaagggaatctgacccttctcgtgtgggaagggggctgagggcaacaacctcctgtgacagccaccctggtccaagccaccttcatctttgtctcctttttttttttttttttttttgagacagagtttcgctgttatcacccaggctggggtgcaatggcacaatcttggctcaccacaacttccgcctcccgggttcaagcaattctcctgcctcagcctcccgagtagctgggattacaggcgcctgccaccacgcccagctaattttagtatttttagtagagacagagtttctccatgttggtcaggctggtctcaaactcctgacctcaggtgatctgcccgcctcagactcccaaagtgctgggattacaggcgtgagccactgcacccagcctgtcttttcctcttaaaagatcttccttctacttttgtcccatagcagccagagtgatccttcaacaaaacgccccatcacatatactccccctcaaacagcccacgctggtccctcagaatccttactgtggctttaaggctgtacatgatgtcccccatttcttccctgcctctcccactacttcctctcttgcttctttagctctggccatgcgggtctcgtggaatttgccagccagcttcaactcttagggcttccgtgctagttttgtcatctgcctgccatgtccttccagcagccagctgggaagatctgaatgtcacctcctcacttaagactctgcctggtcgctcacttactgcggtctacctttcccctctcccctcagctctcccgatccttctgaactctgctctgtttttctttttcctctttttctccataatacaaatcacatattaacaatatgacttactggcttttaaaaaattcttgtggtaattgtttctttccctagaatataattccaccaggatcagggccttcatgtttttctcattggtttctcccatgtgcctcacatataataagggctgcaatgttggtgggctggaggaataaaagaatgaacaggcgcactaaaggcaggatagtttgtccatgtcagagctgctgtctcagctgctttgatacctctgacttcccagggtggcaaagaataaggatgtggcttatgtagaaggcgttagtcatccaaaatgccactgtatatttggaagcaaatattcaccttgaagcagtgatgtactaggaattagaactgcttttctgttacattttttcatttgttatgagtgtttagatacacatgatcactattaaaaggaagggaggtaatagcctatatatcctaccatgcccctcaaggctctgttaggagactaaaatacaaaggtcatttaaaaagttaaaagcttatgcatgtgatgttggtattgctgctaatgactaggcatctagaggtcaaaacctagagctaaggatattgaaccctgtgttttgtctcgttttaagtctaggtttttgtggaggggggaacatacctagccagcttgcttgcagaaggcatgagtgagcaggctgaaggagggacccaaggccagaacgtcctccatattctagctccatgggctctttcacttgatccctgctttatgacccaacttctgttgaaggatttgccagatagtgtttggggcaggaacagctgtttcatagaaaacaagccaacggacatcataacaaagcatatggttgttttgccaagttgtgctgctcattaacaaaacaaaacaacaaaaaccctttacagtgccccagcatgtggatggattggccctttactactctaaaaattagctttacagcctttttatggcttacccaatcttaacagactttatttgtgtgtgtttagggatgcaaatgggtatgttaaatgatagtgttttgcctctacgcaataaaatagggtaattttttcttcccatgtattaaacgagaacacagaacatgcctagcatggtgggctctgatgaaaagaggctgttatcatttggccaacatggaaatcctagcctttatttatttatttatttgagacggagtgccaacatggaaatcctagcctttatttatttgtttgtttgtttgtttgagacggagtttcgctcttgtagcccagactggggtgcactggcatgatctcggctcaccgcaacctccgcctcccaggttcaagcgattctcctgcctcagcctcccaagtagctgggattacaggcatgcgccaccacaccctgctaatttttttattttattttattttagtagagacggggtttctccatgttgatcaggctggtctcaaacttccgtccacctcggcctcccaaagtgctgggattacaggtgtgagccaccccatccggccgaaatcctagcctttatcagaggttccgtggaatctcagaggtctgtgagcaggataaactgctttatggtagtttaaaatgcaaaaccagaaataaaccctcctaaagccagtttgtttccactttctaagtggttacagtgacctgtgttttaagtaccttaaatatatcagtgacctgctgatatacagcttcctgtttcctctgtgtcctgtgacatatcctgacattccttgagccccactcccttcccaaaaggaagtaccttgatgggtgaggacatagggcacacgtgtctctggccttctgtggacataatcacaaaatggtagtcagtcctatgaatttaatctctttaggatataaggatattcacgaaatagaagttgagctctctggacatactccaccttaaaattgctctctccttccgggatcctcaccagctgcagagcagtagtaatgaactattaaattcatttaacaatatcagcatatgctatccttctctgcttgactagacagtaatctggcttgctggttggtatgaatataggataatttcactcacactaattgagatggggagtttgtatgaatggctgaaaaatttgagttaaagataaaaagagacacagcttcctcaactatgggaaataactgggactgttaacaaagatttacttgaagagaaattgtattgctcagggttctccagagaaacaggaccaataggatatatatgtataggaagagattgattctgcagaattgactcacacaacaattatggaggctaagtcccacaatctgttgtctgcaagttggagacccaggagagctggtggtatgatttagtccaaatctaaaggcctgagaaccagggaagacaatggtgtaaatttcagtccagggagaagagaagaccaatatcctgactcaggcagccaggaaataaaaagggtgaactgctccatcctctgcccttttgttttcagaccctcagcagatcgggtgattcctgcccatgttgaggagggtgatttactttactgagtgcaccaattccgatgctaatctcatccagaagcaccctcacaaagacactcagaaacaatgtttaatctgggcaccttgcggcccaatcaagttggcacagaaaattaattaccacagaaatatttctggattcaatggattaagttggtaatatagtattcatattcatttccacgtgcctaaaaagaaggtttttatcctttttaatatcctcagtcctattaaacatacctcacattcatgttccatggttattctcttattatgttgctaagtgcatttctacttaggccaatctgattatagtgattcagattatagtgtttatcttctttcctttatacagtagacagtgttcgcaaaccataggagctgaaaaaatttccttcttatatagtaagttttatgattccagttttccaaaggggtgcttatgttatggttataacagttacagccagatgactatcttcatcagcaggtataaccccaaatatttatacattttcatttgtttcaaacataaaatatggtttgcctaaacatgtcattctgccagattggactatgcaaaagaatgttactgttttattttctgcttttactttaacttgttctcatttgagctctaccagttaagatgagaagatgactaaagctagggaagcacattttaaatgctaaataccatgttcatttcaagttgggaacttgaaatgcaagtatttttaacttaatcattaagttaaagtcagtaagaacgtggtatttagcatttattcattttaacttaatgattaagttaaaaatacttgcatattggtttgcttgaagctatggagaaaaacatttaccttttttccaaaaaggtcttaatattcaaaattattgtttcaatcttacaaattaacaatttacttatttttgatactttcggccttttttatgtgggctacacctaacattttttgaaaaatacatactgcttttcctgtaggttgcactttgtgatcctgtgtgtaattcattttcagtggttctattttatttattttttgttagtttgtattttcttttgtttctttttctcaatttttaaaattttaaaacttgtccttttcttttttttctttattattgcactcttctaccaaaacattttcagtggctttgaataaaagtatcagaactttcccgtggttagcattagctctgagatttgaacaggatgtattaagcagaggaggagggaaggccactaacatgtatgagctccactgtgtgtcaccctctctgccggatgacttacatgtggtatggtatctcattttcccagctctcctatcatgtcctgcggcatgttatcaccacttgataaaaaaattgaaacatggagtgcttaagtttcctgccccaggtcacagctgatctgaaaaagaaatgggattcaaatccaaatgtgcttaattgcaaatccccacatgactctttccttccttccttccttcccccgttgctgccaatgtaagaaggaacaccactccctcatttgctacagagaagacaggggcagctgtgtaaaggcaccaggaatatgccctgcctccttccttccacttgaaagcaacatctggatagacactcaactgcttttattttttgaaaaatgattattaatcaggattgaagtggagggaaaaaatcaaaacgaatgtttctttttaaaatgaaagatactgtttaattatttaacagccttccggttttagttaatatctttgaagactttggattaagattccagacattttcttgaaggatgtagaaaacgtatttaacttcaagtttagtttcaaaatgacttagctatcaattcttctcattgaagtcctctttgagatattatatcccaaatgtaatacacaggtaataattcaataggaatacttggaacattggtgatatttgaataaccttttgaatgaaacaattgatttgatctcaaaagatagtgaaaacgtctcattttgttttttatgttaaatatgcttcctcttaagtcaaaattcttttttctttttgcttttaagctcataaatactctgaattctcactaatcttttggaaaattgcttgtataggtattataattcacttggctcatgagttacataatatagcagtatatgttgcaattcaaatattgcttagcagtattagttgaattcaaaatagaaatcactttctttttgacaactagcataatgaattcattgactattgtcaaatttatgaagacagaaaagtccttttgtgattcaaaaatgtgtttattgatgtttatatatcttttgtcgtgtttccatactgtctcatgaaggttgtcttcgtaattcagttatctaaatacatcatacatttaccttttccctggggtgccgttattctacaacaggctaattacagatatctgtggtttctgcaggagtcttagtgtatgatattgatgatatcatcatttactttcaaaattgcaaaatagtaatttaggaaagcatggggatttggaaaaacatgtcttcagcaccaactgtttttgctctttgcatgcttgtttcgtaaagaactctaatgctataattgcaaaatggaccattttaaagatttttccttcattctgtacttgggagtggtgaaagacatccttactgtgctgcacagtgtctcatggtgttctcttaaacagcattaacgtcttgtatgcgctgctttactaaattctctgttctgagaaataactgaaaatacggctttctattaaacgagtggattattctgttgttgttggcttttttttctcaaacctccttctcttctactttatagttcctacaacagcagccagtacccctgatgccgttgacaagtatctcgagacacctggggatgagaatgaacatgcccatttccagaaagccaaagagaggcttgaggccaagcaccgagagagaatgtcccaggtaagtctggctcttccatcattcagccctacgatattgggaaacctgagcttgcctctgcctcagtctccccacaggcctgctggctttatcaagatctttaaagatgtaaagttctaattttaaatgtttactgtgtgggcacagtttgtgggttttttgcatcctccgtgaacatgctgcctaggaaggatccaggtatagttggattttgtaagcacaaattaaatgatgtctgtaacattctctctggcgaagaaaggtacttggcattattattctgtgtatatgtagtacctgtaatcaacatgttgtaaattaaaatccatcaaaatgctctttagtaaagatgaggttttgtattaaatcccagactgttataattgtgaacctacgattgtttacagtctgtaaaatcatagagacttaaaactgagctgaaccatagtgattatttcatctagtctcctaagtgatacatagtggaatagaggttcgagagagtggcttcccattttagcacaaagcaaaatcagtgagccagagacaacatttagaatccaggcctttcttgctcctagtacagtactcctttcattatactttgctgaaaaaaaaaaaaaaaaaaaaaacctgttttggtttggtttgtttttttttagcaggtccttaattaagcaaattaaaaaataacttatgtctaaaacatggctaatccatatatactatcaactacaattgaagctatgtctgctaccaggcactggatgttgtattggagtttgataatatggaggattttagcccttgctcagattcctcattcattcattcattcaatcaacaaatatggacttattattttccagtcacttttctgatttgtagtctacaaacctaggagtgaatgtggggggaaaagaagtaggacataaaagtgaatgaataaagatctcaggttaaagtaagccattcatttttagtgttaatattctgtggcaaatatcagaagataggagaaatttttgtcttagcacagatgcttaatctcttgagagacattaaatgcaatttatgaattagactgctgcgtattttctaagatcacagtcagtctttagtagacaattaatctttcctgtaatttctgatctgggtccctgctgaccccaggaagattcctccctcccagggccaaatgaatggcccctgagcatgtctttcccatgcaaaccagtcaatcaaaagctccttactcccaaccaccttcttatactctgggccactattcacctgctctaatcaccccaggaccaggtaccagaccactagggacaacctcatgccccatcaccattatttgaactaatcagtcctaaacccgcctaccctgcttcgctcattctttccatgaaaaccacaataaaaggctcttgctcatgttttcccctcctgaccaaccctggtgcttcccatatgaccctgcatgtagtggcatgtaccggcttcttgggagctgagtaacaaactgtcttttccatgataatcatctcctgacctcttggcctcacctgaataataagaaaatctacccttgaaaacataaaactaatagtttatctagaaaggtacaacacaggtactgttttttgtttgtttgttttgttttttgtttgtttgttttgccttaagatgaataacaatacttggatctactttggtataataacataaagaggaaaaaagccttataatcacagtacttttggctctggaatataatgtgcagttctagtggctgcccacgatgaaaacctaacagctaattgaactagaaagctagccacagggaattattaagttttcacctgatgccaagaaaatcagatctttccttaggaaagacacaggcactgttcggaaagcattggaggactatgaatcatacttattgccactgaaatgtcctcatttgaatttacatcctatctcccttctttatgaagctttcagaggcttcctgtgccctcacaaatccacttctgggcacatgaagtcgtaaaaaaagaacaatgacaaaaataaacaccgaatgctcagcttgtcattttcagcgcctaccactgtaccctgactctggtcttcctaccacctcttccttctcaactgctacccttgctttctgtacagcgttaagctgctgttctgatcaggccactctgctcatcgtctgttcatctcatcttgggcttccctttgcccttggcattgagttcttctggaaatgccctcccactcttcttcacgctgacacatctcacccattccttacaccccacttcatactcagaatgagacaggcagtcattgctcttacctttcatttaattctaaatatttgctccccggttttgttagtgatttctggacacacctgcattatctttccaagctggatagaaaccttgagacctcaagtcatgaagcctgctacctgcattcatcgtggacccactgtagcattttttttaatgtgtgtttttttaatcctggattttttctcctagtatatcttgttcatttttgaccttattaagaaaacttatttcaaattctctgttagttttagatgtgacaggtcttctttaaaataataatttaacttttagcacatctgtgtaacttgtgacttagttcatgattttgtagattttgttcatcttttagtcatcagatatatctgatataacctaagagatgttgtcccagagcagagaatgttgtctactagattccagtggtcataggaatgtgagacacctgaaatcaatatgtatcttcatagtctgtggtgctgaaatctagggacttttcaactttaaacttgcctgcctcttaaatctctacttagtagtagtcattttctctgcatgaaacagccaagtctttgaagattgataaatccaaatgaaattgatacctttgtgcctgcagtggaaaattgctttataagaatccatagagccactgcaagggccaggtcctgagaattttaaattttaaaaattgtgcggttttttaaattaagttttattgtagtttttgttatatgttttcttacaaatacagaggattttggaattttttcatattttggtttgttgttgccattgtggagtataactctaaacctgtagatttttgttgctaaacctgtagatttttgttgctatatgtcgtgactagcatctagtcaaatagaaatctacagctgaaccatgtgtgagcacttttattacttataaacttactacttttagtatatgcttaaaatgaagtccttcaaattgaaagctgacccaactcataggtttttatttcttttcttttttggagatggagtcttgctctgtcacccagctggagtgcagtggcacaatctagactcactgcaacctccaactccctggttcaagcgattctcctgcctcagcctccccagtaactgggattacaggcacgtgccaccacgccgagctaatttttgtatttttagtagagacagggtttcaccatgttggccaggatggtctcgatctcctgaccttgtgatccacccgcctgggcctcccaaagtgctgggattataggcatgagccactgtgcctggcctaggtttttatttttaagataagcagcaacattttaagagcgcccctttctcctgtcactaaatataaataaacttagctcacctaatgaattttttattttataataaaaaattgggtaccacagggtacaaaaacatgatctttagagccacagagatcttggtttatattcttccctctcccttttttacctgcatagcctcgagctggtaccttaacctggttcgtaaaatgggatggccctggctaatctcacaagctgttgtgaggaatcaattaaattagatagattttgtaaagctcttaatacagggtcagcagtaatgctacttgttatcagtcccacagtgaaattcactgttcacagggagatggtcagcctacatatagtgtgtattcatttgcagtagagtcttagtgggatggtgcaggtgatttgtttatttgtgggggtataggatattgttaaattgttctgaaaatcaaaatgtgagttaatttctatagtaatgcttatttgcaactcattagctaaataaatctctttaattatttcatggattcccccagcttaaagcttaaagtccagtttcttaaagtgtatgaggtaaaatggaaaaaatgtaaatgtaatatgggaaatcagttctcacattgcagtagaacattgaacttctatctcaaactaattttgagattccttgcttgaagaattgttggtagagtaccaccactgtgaacattcccaaagcaggaaattgaaatatttatattgcaaggcttatctcatctataaagcaaagatggtcttccatttcccccttgcccacaggttccctttattaacttggtagaagcaccaaagcagatgggacaatatgtttcttttcttccatgttctattcttgttcattgcagcagggcatttgtcccaattttgctgtgaaccttgagattatttttgatatgcttttcaagtgtaatgaaatatttattccatcttgtttcctccatggttttacaaaaacaacaagaagaagctaattgcctatcatatacaaagaatgaatgccaatggacaataaaatctgtaattaggaacccacatggtgatttgatatagtattgtctcatagaagtcttctatctatagttatttattccaagcctctttttctttcccatcttgaagtatgttagaagagtctattccttaaggctaagtacctacaaaaaacaggctcttataatacagtaatcaagttttctcatgctttgggagtacacagagtatgcaagtacacatctggcaccaaaccaatattttgtttccttgatctttcttcattttacctagttcagagttgcacttcaaacaaattctacttgtcatacacttgaaaaggcagctgtaggtggtaggaagttaatattttctttgaacaacatacagaggtgcagacttttactttttgtatcaggttaatgagtgaacttctctcagggaaatccaggtgaacatcaaagttgagagcaggaagcattgatttcctacaaaacacattcacctgatatcttagtcagtttgtgttgctataatagaataccccagcctggataatctgtaaagaaaaagaagtttaaaattcggctctcagttttgcaggtggggaagtccaagaacatggtgctggcatctgttgaggacttccttgctgtatcatatatggtggaaggaagaagggcaagaggagggcaaaactgagttttataacaacccacttctcacaataacaaacccactccccccataatgatactaatttactcatgaggacagagactgaatcacctcttacaggacttacccctcaacattgttgcactggggattaagtttccaacacatgctttttaggggttacattcaaaccatagcagttggttactaaattagtgctacttgtaaaaaaatacatgtttgctgcattcagaatattacatgttttcttggagtttttggaaggacttagcgtaatccttgctgttcatgacttaggttggcaagctcaaagggccttaattccccatcagttctttaaagggggataggtcttaggatattagacagcagaagtcttctttttcttcccccattatgtactgctttttggcattgtattcatgacacacacacacataaaatgtcatattttctttaaagtcaaaatatacagtttaaaatggtttcagttgctttcataagagagtaaaacttaggtgttcagtttaatattggaagaccttgttcagttaatgtgtgccttccatgaatagttggtatttgttcacatcaaatcaaatgactgtcagttctcggggtaaaaaaagaccaaccttgactcaaaaagctatattcctgcaataaatatgaacatttatgtttaatatactgctgtgattaattatttatatcctagtgggaggtcaaatattcttcagataggaaggggtatgtaataaattttttaaatatctaaaatgacaaaaatagaggaaaaacataatcatccatcctattaagtctgtattcaaaggatgaactgatgattttaaattcaaatgtttccttaatttataggtcatgagagaatgggaagaggcagaacgtcaagcaaagaacttgcctaaagctgataagaaggcagttatccaggtaaaacctgaacccatttcctaccaaacatcacatgccagcagtctttttaatgagtgtctgcaggtttacctttatctgccagcacctcacgtgtgattgttcatagtcccatgaacttcagctgttcttaatcattgtctagtaattgagttgtttaaatcctgccttatatttgctcccaattatttcaagttataattcattgccataaaactcacattgtaacttgcaatctactttttattaataatacatcttttcagtcaccacaatcttctgctgcttctccctccagcaaaaattatgagaatttgaatttttgatggaaaccagtctcaaaattaccttaagtaaaccaacagtttattatggtcaattacttgaggtactgttagtaagagagggatttttttttaatatgtaatataagagtttcaagagtgcatatatttatccaaagttattagtcaaatcagccttcagagagcctatgaaatactgattttcaatgagaaagtaggtttgatgagggttggagagtgcaagaaagtgaagtaagctataaaacgtagaattagtcaatgttggaatgactatgcagtctttaggatactttttagcactagaagaaaatggaataggatgtcttttttagaagacttgaaattgctgcttcatcctacttattcagtccccatggacatatgtgtttatgatggcagcatttccaggagaaagtggaatctttggaacaggaagcagccaacgagagacagcagctggtggagacacacatggccagagtggaagccatgctcaatgaccgccgccgcctggccctggagaactacatcaccgctctgcaggctgttcctcctcgggtaggtctcgctgcagccgagttcacacttcaggtcacagcacagacagtaagggtggggcactgggaactggaagccatacaaaaagaatgaggagaaatgccttgagcactgttattcagaggttcaacccctgtccattccatcttgaaggtcaaagggtcacagggcagctacctccacaaggtcatctctacacagcaggtactcacacttccccacagagcagccagacaggactcccagggactcacattgcaagccctgacttgatttaatattcctgaggtggtgacaattgatggcatagttcaagttcgaacacaaaagctggaaggatgtcttccagtcccttcaggctgctgtaacagaataccatagactgggtaccttatcagcaacagaagtttatttctcacagttgcagaggctgagaagtccaagatcaagacatcagcatacttggttgtctggtgaaagtttgcttcctggttcatagaacttaaattttgtttatcttttatttattttatttttgtttttgtttgtattttgctgtatcctcatatggtggaatgggcaagagagctctctgggccctcttttataagggtactaatgtcaatcttgaaggctctgccctcatgcctaattgtctcccaaagctttcaccctcaaatagcatcacactgtggcttaggtttcaacatatgaattgggggtgggagagacacaaacattcagaccatggcaaaggattttagaagtaaccttgcccagccccctcatcatgtaagtataataatataactaaggtcaaggaaagttgagatttggctgagttgtaagaatttttagtggaccagaaagaattagaactcaaatttccatctcagagcagtggccatattctctgtggggaagcatttgtcagtcatgacattagcaatgatgagacttattcatggttttcagtgatcattgccccaaaaaggcatgttgagtggtacaggcatagatgtgttcaccggcattctgtgggagagcttacttggaatggaaggaactttctgagcatgagtgtgtaacttatgtccacttgttctttttttttttttttttttttaaatgagatggagtctcactctgtcacccaggctggagtgcagtggtgcaatctcagctcactgcaacttctgtctcctgggtttaagcaattctcatgcctcagcctcccaagtacctaggattacaggtgagccacgacacccagctaatttttgtattttagtagagacagggtttcaacatgttggccaggctgatctcgaactcctgacctcaggtgatccacccacctcggcctcccacagtgctgggattacaggcgtgaaccaccatgcccagccatttgttctttctgtttgtcattgagcaagggatattgaaagctctgcctgtgattgtggaccgggccatttttctaaacagtgctatcagtttttattttgtatagtttgaggctgtgtttttaggcgtgtaaatgttccaggctgttaggccctccttgagcctcttcttatgaaatgatctttttatcctttgtaatgttttgctccaaaatctactttaatattaataaagctattccagctttcttttgattaatattaatgtggtgcatttttccatccttatactcttattgaccttgtttgtctttatatttgaagtgtattttttgtaggcagcatgtaattgggtcttgcgttttcctttggattgggaagaccatgtacactgaatgaggttatggatatggttgtcactgaatctgtcatcttgatatttgtttgctatttgtccagtctgttccttgttcttcttttttcctcttttttttttggattaattagaaattttttatgattctattttatctcttttgttggtttgtaagttacaactagtttgttattttactggtttatctcctttgtgggtttataagttataactagtttgttattttactggttgctttaggcttatagaaaacattctaaacttgtcacgatgatgttatgtcagttcaaatgatattataccactccacagacagtactttacaaaagtacttccatttttcatctctctctctctctgtaagcggttgttgtcatactttttccttactacattgttgatgtttttctttaaacagttattttttaatgagttgtaaatttaaaaaaaaaacaacatgtttacccatgaagtcatcattttgggtgctgtaaactctttgcgcagatccagctggtatcattttccttctgcctgagagatttcctttaaaatgtcttagagactgggcttggtggcttgtacctgcaatcccagcaactcaggaggttgagataggagatcacttgaacccaggagttcgagactgcagtgagctgtgattgcatgactgtactcccatctgggtgacaaagggcatcctgtctctttaaaaaaaaaagtttgagtgcacataagttggtgatgaaatctttgtttggctttgaccaaaaatgtcccttttatacctttggttttgaaaaatatttttgctgggtaaaaaatactggattgaggtttctctttcactgcctgaaagatgatactctgctgtcttatttgtgttgatatctttatctttatttctctaaaaataacatgtcttttttttctgtttttacagttttctctatatcactggtttttaacaatttaattttgatatgccatggtatcattcagtctgcccttaattccatctggccgtttttcatcttatcacctcacatactgtagttgttgtatatagaaatttaacctgggctacccccaacacccataatatcgtctgtatcttaacttttgaacctatggaatacagttattatatgaaaactgtttaaatatccatgtttgctaattctaacatctctgtcaactttgaatcaattttgattgcttattattacatgtggcatttccctgtatcattttatgcctcataattttttattaaatgtcggacgctgaatttaaacctgttgaatgctaggtgtttttgtaatattcttgagcttttttctgtcacatagttgagttacttggaaacagtttgatccttttgagctttgcatttttagatttgttaggtgggatagaagcagttatcagcctaggactagttattccttactagtgaggcaagacccttctcagtcatctaccatgaatgttaagttttctcacctgactcgtgggaagaggcattattcctgtccctgtgtgaacaccaagcactgttaatgctaattctttttggtgattttccccctggcttcagtttctttcacatgcatgtacccatcattactcagctatattctcagggatcactctgcacatctctggattctcttttggagcaactctctcctcaccaataccctgtcctgtgaattacaactaccttgatctctccacacacttcatgtcctccactccacgagtcctctaggctctgtgtgggtttccccacctgaaaccatgacctggaaattcagggccatgagtttggcagctgtaagtcctcatttgtttccccttttcaggaatcagtgtccttcacctgatgtctaatgtcttgcagaaatgttgtttatgccaggtgtggtggctcacgcctgtaatcccagcactttgggaggccaaggcgggcggatcacgaggtcaagagatcaagaccatcctggccaacatggtgaaccccgtctctactaaaaatacaaaaaattagccaggtgtggtggcgcacacctgtagtcccagctactcaggaggctgaggcaggagaatcacctgaacctgggaggcagaggttgcagtgagccgagattgtgccactgcactccagtgtggtgacagagcaagactccatctcaaaaaaaaaaaagaaacgctgtttgtatatgaatatattgtccagttattggtggttcaggcaggagggtaaatccagttcttctcactcaatcttggctggaattgtttgtgcattttatgcaacttaaccagaaagtcacccatttgcaccgattttcctcaccattttgatttttctttctatggataaagttacagtgcacagaaagccatgaggagccgttaaagagctcgtggcattcttccaagacgtaagatactatttaccctgttctaccgatgatatcactgcaacctcgggagatggagcggctggttcagggtgacactgctgggaagggagagggtagagccgcgagtcactgtggtgccttctcactagaacgagcttcctctctaaacaaagagcttttgaaaaagaatattcatattagcgttttcattttctatttgccaaaattctctatcttagcaaggcacttgtcaggaaatttttttttatatctctgcagaacaaaagttccttggttcctctcttttttggagaacacgctttcaggagaggagccgtgtgatcatttgccagagaaggataggctggtgggtgctgagaccagaatctttatagcagaaacttgtgaagcgttccagctgaaagtccaatctctaaagtaagatctttgctaaatggacattgatgggactaaaaataagctgagggctgaatggaggctttaacaaatgtacatttaaactctcagtttagtctcatcagccatcacaggaaaggcagtggcaagaatgtttgccgaagtgtcatcttttatcaaaggggataattttagagtggttgtaatcgtgcttattgtgggcctccgcattgcttcatatggaattaggcaacatgttcatttgaaaaaaaaattaaaaactggattaggaagaaatattttactgtcaaaaatcagatcactgttgttgattgatctaaggattcctgttaaattcttaactcggatttatttatttatttatttattttctctctctctctctctttctctgtttctctttctctcctgccttccttccttccctccctccctccttccttcttcccttcctttcctttcctttccttttctcttcccctcccctcttctcttctctaatcttctcttttcttttctcttttcttttcttttcttttgttttcttttcttttcttttcagggtcttgctctttcacccaggctggcatgcagtggtccagtcgtagctcactgcagccccaacctcctgggctcaagcaatccttttgcctcagcctcatgagagttgggtctacagaagctccaccatgtgtggctaatttttaaaaaatttttgtaaagacagggtctcgctgtgttacccaggctagtcttgaacttctggcctcaagcgatcctttcacctcggctttttaaagtgctgatattacaggcatgagccaccatgactcacctttaaatctttcctttgtaataaaatgtggctgggtggtcacaggcctggagtctagggggcattacttgccatttttgttaagttaccatctttaggtgttcatttaagttttaatgttgtatggcttgacctggcacttaggtctgcactttggcaggcacaagaaaattgtaaataccttcttttttttttttttttttttttttttgagacagagtcttgctttgtcgcccaggctggagtgcagtggcgtgatcttggctcactgcaagctccgccttctgggttcacaccattctccagcctcagcctctcaagtagctgggactacaggcacccgccaccatgcctggctaatgtttttttttttttgtatttttagtagagacgggctttcaccgtgttagccaggttggtctggatctcctgacctcgtgatccgccagcctccgcctcccaaagtgctgagattgcaggcgtaattaaatgccttcttgaggacttttataccttcctcttgaagacataaatccagagcttactggtggttgtctgaaaaagatcacatcttgtaataggagtcatacataaatatttctgagatctccctcatacttaaccaccgtgcctggaaaatgcagacaactgtattcagtaaatggtatttgaatataagtaaatcaaaagtgtcgtttccatagattctgtagatgttaccacttagaataattacctgtctaacccttaacaaattctaccgtatattctcagactttgcaaacacgggattccaaaacaatgtggattgttttcagtttctttgaagctcagatttaaatcatacttttactcagtttttaaacctaaacgtggaagtgttatgagatgttgtttttgtgcagctagaattccttgttctactaatgaatttcatttcctgagtccctgtgtctgagtatactgtatgtttcaaatttctgatttagttatgtacctataggcaaatacactgaatggtcaacctaaaaatgcattgtttgactcatatttagagtcatacatatataggcacatgtatttaaaataaatactttaggctagatgtggtggctcacagctgtaatcccagcattttgggaggctgaggtgggaggatcccttgagcccaggaatttgagaccaccctaggcaacatagaaaggccctatctctacaaaaaaaaaaaaaaaaaaagatttttttaattagccaggcatgatggtgcgcgcctgtagtcgcagctactctggaggctgaggtgtgagtgtgaaccaggaagtcaaggctgcagtgagctgtgatggtgccactgcactccagcctggatgacaaagcaagacgctgttccaaaattaaaagttaaaaaatgagataaatacttgaaatattacaattattaaaatagttgttttccccatgggaaaaaaaagttgagcagagctgtgtctttgcactcagaaaaaactcttactctgttgaaggctagtgactcttctaaacaccaaccccttcacctttttactttccttagactttctttggaaaatcaaggagttagcactttttccccctggaagaattaaatgcctctccagaactgcagcacaggaggttaacttctaccacctttggaggcctgcaagctaccagattaaatacttaaagctaagcattcatcatttcttaacctgccctctacagtcatgcacttcctgctttttactttgtcagggctcgtactcaaactattcatagcttcatgaaacaggaactaaatgctgtctgagcctttccccttgtaactctcagcgttctgcttatccttcatagacagaagatgatgatatgtcctgactgttgaagagaaattagacttaatgtgatcctgtacagttaaaccaaaggccagatagggattttttatttcaatcaactttctattgtaggcctaggtttggaaaaccttagcaccccctaatttgtaagacttgaactgttttaaagataagggatacacagccaaagctttctttgtaattctgagatttttggtgtttttacagatacttagtctaaatctttcatcagacagttatcatgattattattctgacttcaacaactgcattttctaaagggaagtgagaattaggaaacattttcctgtacatctgtttatctatcccagttgtgttgtttggattttttcagtgtcttaacgattgaaaccatcttatccatactgaaattcatttcatgcttctatctgctgcttcacattcaggctatcagtttaattgagcaaaaaaaaaatgttggcagtttctatagcatcggcatccttctttggtttctcatttttgaatggttcagccacatgttaaattttgctgagatctctggaaacttcttcacataattctttgatagaacatgaattctgtgagactcttcattaaagagcacggtttcatcactaagttgagattttgctcaaggctatttggtaaattccagcagaagagcaataaatgttcaacaagaaacagccgtcattggagataacaagggtagacattaatgggaggtttgtcacaggtaaacaggtgatggcatgagaaggtttaaaccacctcataaataaatttttcgccactatatgatgtggattacaactaaaccaaactttaaccaatgtgggtgttggtgtacctttcttttctaaagcaaaaaagaaattgtggtactaaacttgagcttttatatgataccgctaattgcccttcacccaacaaaccaattatttctacccatcacttttcgttgcaaaagaaattatcttataaaatatatgtatatagcatatatctccaaagcaaatatgggacatctgtacctcaatgtaactgatagtaagttaaaaattatttgctgagttcttggtatgtggacagatgaatattataatgtttaaggcattccaccagcaggttttgaatttaaccaaaattttatgaagctaatcagaatggaattaaaagttgaaagactgccaggccaaaaagatcatctttcagaaaagtaaataattgctctatacttacatatttattatttatttgttcaccatccgtttatttttagttgagttctgtatacattggtgagcaaagggggactcattagcttgggcactcctaagggcaaacccaataacagatagtgaatgggaaggaaaatgagagaattagcatttagtgaacaaaatcttataaactatgctgaatggtatacatgctctttcagtaaagccactcagtactattacttccctaccttctgaatgtttaccaagttcgataaaatcttgctacatacaaatgggaagtatgtaacaagagatactagtggtttctgggtttaattaagttacatagaacattaagaagtatgttgggaaggcattagcttaaaagctgtcttttgccactgaggccatattcatcacccagattccctccacagtggagcactgctcagtcactgccttcagaatgcaaataggtcttcacaggatgctattaaaacccatagcaccgtatggttttacgctctgctttcttccagcaaacctacgtattttaatgttaatatatatgttcattttatctttgagaatgaaaatgtattatgaaaatataaatatttagtttttgtagacaaatagcacatttaaagatccagtagttattcacctgcctggtatgactgatagagaacagatgggtagcaaagaatcctcaccctggaaacatgtacgcatacacacgcaaacacaatctcgcataagctttaaggggttcattcattttgtgaaggttgaccatggataccagtttaaagatgccaggtgatgtttggcttttaagtatcatcaccttgagtttccttatataaatgttttaatatcaacaaaaaactcagaatttctaataggtcataacactgcctaggtatgggaagaggagagggtaaaattaaaagaaatgcaaatgtacttttctttgaataggctaaccagttagaggatgtatgaagcaggaccaccatagtccaagtatgaatatgcaaaattaaagcagattgctgtaaatctctcttaaaaagtcaagaatatgtcacagttggcatttttcggatgatcagaccgtttgacaaatctctgcaagggtccgagttagtcgaacatatcttttgcttatgatttcagcaacactgtgcgctttgccttctgggttgtattactaattctgttcatcattaagtgtacacatgtttcactgtttgactaaacaaagcttgaagacatacaagtccaaacattttctgtcctttctgtattcccaggtcagaagatcttagctctttatccattctgtgctagagtttgtctgaaagcatgaatcatggggttgtgttgggtgctaaatttcagttctatatgctgccttcactaatttatgactgtggtctgaacaaccaaaataaattatttctgagaactagcaaaataccctggaaaaaatttatgaaacctaccagatttgtaaaaaggtcagccaggcgtggtggctcatgcctgtaatcccagcactttgggaggccaaggcgggtggatcacctgaggtcgggagttcaagaccagccggaccaacatggagaaaccctgtctctactaaaaatacaaaattagctgggcatggtggcgcatgcctgtaatcccagctactcgggaggctgaggcaggagaatcgcttgaacccgggttgcagtgaggggagatcaccccattgtactccagcctgtataacaagagtgaaactccgtctcagaaaaaaaaaaaaaaaaaagaaaagaaaaaaggtcactaagtgatgagagaattaaaaccactcctattttctaccttttataacataaactcttgtctttacttcccaggtttgccatctttataacctgtaactaggagcaagtgatttaataaagggattcctcctattccgtctgcaaattggagttaatttttctcctctttctgcaatttctgttgttttagcttttgttagccataattagaaaatcaaaaggattcattgaaagttgagacaaaattgtgaagtaggaagatgtcttcctccgtaagaggagaaagattgttagaggaagtacatggaggctttggtgacacatccctatgaggaagtgatctgcttccacgggaaggagagaacagatgatagatgactcctagatgctcctgcgtcatgttcagtacaaaatcagagccgcatcagcaaaccggataccctgggaaggaacattgggataactccttggccataaacaaaagttttgctctggccttatgaactaagtggattaatagagattagttgttcaatatccttccatctaatggatccatattgttaaaacttaagaaacaccaaagggggagagtgtgagaatctactgccattttctccattgcttcattcaagacttctgtgtccaccttggcatgggattatcatttgcccttttatactcaccttaaactacaaagatcatttgtttgcctttctgaagaaaggaaggtggataaattttgcaggagactttaaaaattcagctcaactcctggcattaaagacaataaaggtggtgattcagaggtccccatggcagtttccccaaatattacgtttaactaagatcatctcaagcacagagagacttaactctctaaagtgtgatttttaaacctgcacacggaaattttctacattttatatgctcaagatttcttgaaatccagggtgtaaaactgtgaaaataatagttctgaacctatttatgaaagcaggagagaattgctttgttcagttttggaaaccaccagggtgcaatttaatgctccaggagagggttttctgtgacctggaaaggttggggtgattcccgtacagtgagtcatttacttccttcttggcaggattatgcccagggcttttaaacgctcttgacacttcactgccttccataagaaacgggtttagggcacaagtgtctattatgataagatgccagatttctagatcaagcataaagctgtggagtgggacaataggacttaataattttaatacacttcccacgtgaactgtcaagtaataagctacatattcagacgtgactggcattgagtcatcctgccattagtcaaatgtatgagacttttcccaagtcccagcaacaccaaatttgagaaatcgtataaaagaaaaatgaaaaagtaaatacgtctaagaaatggggaaatcaataaaaaatgtactagcaccaggggcggtggctcacgcctgtaatcccagcactttgggaggccgaggcaggtggatcacctgaggtcaggagtttgagaccagcctatccaacatagtgaaacccttctctactaaaaatacaaaaattaggtcggtgtgagggtgcacgcctgtaatcccagctgaactcaagaggctggggcaagagaattgcttgaacccaggaggtggaggttgcagtgagttgaggtggaggtgcaccactgcactccagcctgggcgacagagtgagactccatctccaaaaccgtgttagcttttatcaggaaaggccattaaattttcttcaatattacctacatcaatttgacatcaaactataagaacacaatatgtgagatgttttgaaattaatgaaatgaatcttctctttgagacgagtttgtgcacgctatgaagtccattaaatattttctgggaagagttcccagttaaaactactttctaaagtacccaagcacactatatagatacatcaagtaggtttattaatgtcagtatttcggtgaaaattgggaaggccactattctgagtagagaggtgtttgttttctacttgaagactatgaaggatattctgcactactgggcctatttctgaaattgtatctagctgcaagttactcattaatttaattaacaaatatttattagcaaccaaattgtggcaggaactgtgcctagaggtagaaatacattacgctcttgtttccagagaggaaaatgagtaatgttctaaaatgtaaatcttatgtttctctttcctcttgctgtaaatgatgtctaagccatttcggtggtgcctgttcttaatcctttaataaattattttgaatgattttttaaaaggcagtgtgattgtgaggtgagtttagtacaaattaaaaaatgtcacatcagttgcaaacagacagcacataattatgagctaaacactgtttcagaaacagtagtgacaataaataggattcggtataattagtcctcctgggacagatctcttcctctgttctttgccatatattttaataatgagattagccatctaatgccaatataaccagactgtagtattaatacacagaaaaattattgctagtaacagaagatttaaagacatgagggtgatccggattatatgcctgcaggttaaaaaaaaaaaatgtttcttaaactctctttatcaatatccttttcgtgagccactgaattcttttgtttttctgatcatatgaataacccgtcttaagtatgaatattgtgacaatagtaatagcaattactttaagagaatatgtttctatagagataacagaggggtttttccctaccattcctgtatgaaggtttctgtgtttttaattaaaattttaagaaattcatctttgtcttagcataataaaataaacctcactagacaatcaggacaccttgttattcttagatacattattatagctcaagaaataacaaatgttaagcctggaggatttgtattttggccaaaagttgtgagggcaattatttatttatttgagtgaaatatgcaggaatcatatatcaaaaggagggaggtcttttttttaacctcaacaaaaatataaaagtatagggaactgttatctatgtgaacccagcaaatctgagacaggtctcagttaatttagaaagtttattttgccctggttgaggatgcacctgtgacacggcctcaggaagtcctgatgacatgtgcccaaagtggttggggcacagcttagtgttatgcatttttagggagacatgaggcatcagtcaatacatataagaagtacattggtttggtctggaaaggcgagacagcttgaaacaaaaagcaggaagactcgaagtggggaggggccttctaggtcagagataggtgagatgaacagttgcattcttttgagtttctgattagcctctccagggtagacaatcagggtgattggctctaagcagttcccagctagacttttccctttagcttagtgatttgggggccccaagaattattttctttttacacctgtgttttttctttcttaactaaaaatagtatttgtttctgagggatagagataactaccattttatttggtatgatttatttgcctaccgtccaacaaagaaggtaatctgattttgttttcatttccaagcatgattcctagagatgtgtttaggtggccaaatcaatgaagcagaaccctgcaaattcatttattgggagatatcctaaggtcttcctgaattatctgatgttcccaggctttgcttatccaataggcattaggaagaaaaggcttgtgtttatgtagatgcacacaaaatgcgcatctcagcttacataaacagtgaaggggtttcccaggtctcattatccctggaggagctgaggcctggggagtcctcagagcctcctttgctactctgttattgtggcaggccaaatctcactaatgcaggcctccgtaacagctgtttccgtactgactgagtggttcagttaaatactaaaagctaaaaaaaagccagcgcccttatacagaggctggaatgtaacaaaagcccaccaagagttttgcctaggcctttcctggcaaaaccaaggaattcttaacaggacccatttaggattaacaagttttactgggagtctgaagaaactctacaggcctccaagaacaagtttactggaggtctgcaggaactcctcaaacctccctgatttagcaggagacaagataagagtaatcaccccagcacctagacccatttagattaagtaaatttactgagactccagaggaaggtcttcaggactcagaccttagttatggattaaagaagttaatcacttctgtcatgagatgaatgcacacttacacgtagacatacagcttagaaggcatataagttctggaaactttgtaattttgagttggtctggcactaatttccaggccatctccctgtaaaaggttacaaaaataaaaactctcttcctcccagttcatctgcatctcgttattgggctgtgaggtatagtagcccaaccctcagttcagtccgggaacattattatcaaactctggggattttcaggataagttaggaatatattttgaaggagaatggcagtattaaatgagatcagcaattgaaaacatgtgaatacattcaccatttaattacccatctcaatagaagataaggatgaatttagcactagaaaccatgaatgtcacaaaagcctaactttaataccttgaatcactttccagtaatcctaatcctttatccacatggatagaggacattcctatcttgctctttcttctccccacacattagcttaataattagctaaataatttcatgcattagctaaggaataatggaactccagaaacctaggacagtaattgagagactgaacaagctaaatctgaaccttctgcacaattaaaggagctgatgttagcatggcccacagaatattacctgcacttgtaaaaactagaaagtcaggcaagtactcctggaacagactgtcttttctaaccatgcacttatttctttgtttttaactttgtttttgtttgtttgtttttgagacggagtctcgtcctgtcgcccaggctgtagtgcagtggtggaatctcaggtcactgcaagctccgcctcccaggttcaaacaattctcctgcctcagcctcccgagtagctgggactacaggcgcccaccaccatgccttgctaatttttgtatttttagtagagatggggtttcaccatgttggccaggctggtctggaactcctgacctcgtgacctgcccgcctcggcctcccaaagtgctgggattacaggcgtgagccacggcgcctggcctgtttttaacttcgtaagttgctttgtagaactatcttaaacttggtctattttagattctccttgaagggccagatcacaaagtgattaggagaaggaggctctggagccaagacagtgagactaacccattcttcaaatctaacactaactagctgtgtaaccattgggccagggatgtagcctatgtaaccacaatctcctttgtgcttcatgcctcaccaataaggtggggagagctgctatgactctgtcatagggctgagacgaagatttgatgagttaccagcaaaaagcatttaatatactgtctcattcagaagcagtcaatacacattgaactcttattacttagaggaaagaaaggggtcgatgatttatagataaggcctgagtgaaagaaataaatgtgtattgagtatcagcaatggactacgcatcattctgggtaactatcactgaacacatttaatctgcaaatactatctgaaagatactgccatctgaattgcataggtgggaaaagtcaaggcttttgtgcttatttttaaatgtatgttaacatgaataattaattggccgtgcactggtcgcacgcctgtaatcctagcactttgggaggccaaggcgggcagatcacgaggtcaggagatggagaccatcctggctaacatggcgaaaccccgtctctactaaaaatacaaaaaaattagctgagcatggtggcacgtgcctgtagtcccagctactcaggagactgaggcaggagaatcacttgaacccaggaggcggaggttgcagtgagccaagatcacgccactgcactccagcctgggagacagggcgagattccatctcaaagaataataataataataattagtgggaatatatgctgtttgttgtgataggagaagaaaaggggagatccagatgttggtcatcagaaatgacctgcatcttctctaaattgaaatttagcttgaagtagtaatgccaaggccagcctggggccatggcatcctggtgtacctgcttgttggtgacagtccttttaggacaaaatatcttacaaaaacattcatagatgactaactggaaaaaaagaagttatgatgaaaagcaattcttactgtttttgttttttgttttttgttttttttaattaaaagacaggcagttattctctttcccaggcttgagtacagtcgtgcaatcagggctcactacagcctcaacctcctgggttcaaataatcctcctgaccaagcttcccaagtagctggaactgcaggcatgtgtcactgcacctagctaatttttaaaattttcttgtagagacaggttcttgtaatgttgtccaggctggtctcaaactcttggctgcaagtgatcctcctgcctcagactcccaaagcaatccttacttttttaattgaagtgctttttttttttcttatttaaactcttaaaaattcatcccattttcttcaaaacaataaatcctttacaagggagaaaaatgaaatagagcaactaagaaagcatccatgaaggccaggaaggaacatcatggttaaatgcgattagtcacagccccttctgtctccagtcttggatgaataatggtaacagaactagagagatttctaagaccttggtgcttaataacaagcaagcatcgagggtggttgtgcaagatcctgatcacacaactctgcatatcaaatatccttcacaatcaacaagagtcagcctttaatctctgatgttttcaaatgttctttttttttaattcacatgtataacctatcctcttttcaatatatagagatatagcttatcagtcattacctcttttactacttttcttctgagatttaaaaggtcatcctctgatttgtaaattcaaccagatttcacagttcagatgagagttgtaataagttgccaagaactgttgcaagctgtgatggctgtctttctggggattatagagaagcacatttcttttaggaaaaaagaaggcagatgagcccaagttgttttatttttattgtgtatatgtatttgttttctcaagtacagtagcatggcctctgtggcaggcattcaccaagcaaatacagagcaccctctgggtcaagcactgtgttattggggttccaaataaagaaaaaagaccaaatccagccctgtggatctcacattaaagaggggagtaagaatcatagataatttaatgagttaggtacattaatggggatttgcacagtatttcataggagcacagaaaaagggtacctcgttccacctgagatggcagggagatggctcctaagttaactaagcaaaaggggaaggagaggcacatcccataggatatggataacacaacaaaagctccattaccacccgccccaccaccacacacaccatctctggaataaattttgtaccttccaactggttttcagggtactcatgacacatgggttaataatagctaggtttgcccaaatgaccaaaattctattcccaacatgaattttcacaactggtttttttgtttgtttgttttaatgaagaagaaatgttgtgtttttggaaatcatcttacaaaatcatgtagtggaatgcatatagtgatgaaattgttgaagaccagggaatctttgtccttagtttttattaggatggatgttttcaggtaaaactaaaataaaaatgaaatggaaccaattagaaagaaaataggagcacttaagacgaaatgtaattgttgctgaaagaattagaatctgatagcttagaaagaacttaattaaatttcagagtaaaataaatacagtttagcaatggcctttctcctagaaaaatataatgtctcttacagttcagttactccttggcttacaaaatagtggttaaatttcctgtttttctcattttgatttcgtatgttacatgttactggtgatgggattatctgtgtgacattacctctggtcttcaaaatgtacacgtagcaatgtagtctcacatatgccccttgggtgcgaaaagagaaggacctaacttaacctgacagacctcaaatctgttctctttctatagcagagtactcctatttaaaaagaaaatgttgagtaaggaggacagtcatcatatatgtcgagaatgttaaatgctcttgtggaagtgaaaagcagccgatctaagtaattacccattaagaaaggagtaggagaaatgtttagaaggcagacctgcaaaaaggtgactcacagtacgttcacatgaccggatgcattagtggaacctctaacccatcgccaatggaagaagcagtgttttgcacaaacttgaaaaagagtttttcattttcctcccacagcctcgtcacgtgttcaatatgctaaagaagtatgtccgcgcagaacagaaggacagacagcacaccctaaagcatttcgagcatgtgcgcatggtggatcccaagaaagccgctcagatccggtcccaggtaagcgtggggtataatcatcttctgcagctttgacaatccaggattcttgcttcttgggttggtgacaggatcccacgcattctccgagcacctataggtgttttccctatggcaagagctctttaacttctggtaaattctaaaagcttgtcttagagcaatatgtggtttggcattttctgagttatgaaaataacaaatgtaaaaatcttagtctactgctaactgattgctaaggaactgattaaaaccaatgactaaaatgagaaaaacaaaagttgtataaactaaaatcttgaaaactggttcaactgaagtatggcaggcaatcataaacctactggaatgttgagatttcatgtgagcctaaatgaagcccagtaataatgtattttatactccccggttcccaaaggctgaaaactgggatctaccttaggaaatgtgaaattttacattttcttgaatgaaagagttaaatatatatagcatgaaatagccaatcaaattgaaatacgttgttttctagggggaaatttgcaaagaaatgtatttaggcatgagggtcctgttaagagagcctcagtattaggaatcagaggtggcagaggtagcctttttaattggctgttataagcatacaagataatggtaagtttcaagatcaagtcttaaacctgagctcaaaaagttagagaacagaaataggagaacaagaaaaataaagttgccctttcagttcaacctttttaacagtagcagtgttttgtcagttttcttttggaagtttgtatctacctgcagtgcttggtaagaaaaataacctgggcgacagagcgagactccgtctcaaaaaaaaaagaaaaaaagaaagaaaaagaaccattcctacccccagacattgttgacctggagttgtcatcctttgatgcaggttatgacacacctccgtgtgatttatgagcgcatgaatcagtctctctccctgctctacaacgtgcctgcagtggccgaggagattcaggatgaagttggtaagtaagctgttcttttgatgctgcacatggacatgtattttcccccagaggaaaattgaggaagtgagttatctgtttgaggaatatggaagttaatagaacagcttgccttttacgatgaaactgtcaggctggaactagcttactagccttagcaattgaatcagttcttacctctccatacttgtaagactggaggaatgtcgcctgacttagggtatagttttgtaataattggacacttgttattgaattatacgtggcagcattttttctaatttgcccaatcttgttatggctctcaaattatgatgctttggtactttacaattaatggggaaaaaaactcattcttcatcttttgagtgtcacgattgttccatcttacaaatgaaaaagctcaaacttaaaatttgagtaacttactggcctgtgtcacatgcattataagtagcacagccaaaacacataactgtgacttgtgactttgaggttattgttatattcagtaagtcacaattctctttgatggctgagcagggaagccatgagtgttctctgaaccacatcattgtttaaacttaaaagatagtgggctattaaacttatattctgaaataattgtactctcacaagaacttggaaaaatagtacagagaggtctcatgcatccatcacccacatgcctcaccagtgacatcttacgtaactatagtccattatcaaaaccaggaaactgaccttgtgtgcccactgtcttttatgtccctagttttcctaatgactaatgatttcatttaagatctctcatttctgtttctcttggaaagagaataaaataccacatgagtctctgtcagctgccaaaatgcccataactgtttaacttacttcacaaaggtacatagatgacgattatgttggtgcatctttcaatataagcatatgtacctatactggagatttagtgtgtagtctaccaacatataagcaatatgtatctggcatatccttccccataaagaatcctaccctttgttaattgggttggaaatagatacaggttatcatctggaatcagagcacccaggatgttgtagatggatgtacccattacagtaagtccgactttgaagtgcctgaaacaccgctcaagggaacagctggccctcactttttcccattttatgccagtgttattctgctcattctttcctgatttatgtggccttgtaaatattgtttgtattgctgtgaaatatttggcatgtgtcaagtgatgatgttctgttcagtactgcacattaatggacggaatctgaaattatactttgagctacataacttgcagaagaaacttcatatgtcagggaggtgcagtgtcccagaactttgggaggccaaggtgagcagatcacctgaggccaggagttcgaaaccagcctggccaacatggtgaaaccccctctctaatttaaaaaagaagagaaaaaaagcaacttcatagtgtgccaagcttttgttcagaaggagcaactcagtgttgagcaagaatttatgaagatagtggaggtggagtttttagtctacaccatgaattgagaacagagatctccaattaatttttcactgtatcaagtttctttagcaaacaaatatacttttcaggtatacttggagaatagacatcagtaaggaacctttaaaatactatgtattaaataagtgtaaagaagttctccaaaaagttgtagaaggtacaaaatgaaataatttatcagtcttaatgaactgaagctaaaatcttctagaaaacatggtttgtttgtttgtttgtttgttttttacagctatcttaagcctgttttcacatgtgacttcagttgaagtggcataggtaataactatagggaaataagccattacaaaggactaaaaagttgatgaccaatattccaccctcacccagcaattattgttgactctttataattaaattattagaactttttatttggcactatactactgaaaacattagccactaattagtcacacttccacagaacagatggtggttcagatatcttgaatattacgaaatgcccaagaatagggcagcacaataaacttcaaatctcagtaccagggaggatatttagataactagtatcatggaatctttttctgtaaaaagaaaaaaaaaaacagccattaggttggattaagaacatattagggggtgcagcacaccaacatggcacatgtatacatatgtaacagacctgcacgttgtgcacatgtaccctcaaacttaaagtataataaaaataaagaacatattacgtatgtgctcttaatgtgtgtgtgtgtgtgtgtgtgtgtgtgtgtgtgtatgtatgtaatatgctctcaatccacccattagttgggtttttttaagtaatgacatatatatcattctaaatataccagatgccacattctgaaagataatcttttttaaaaacctttcatttggaatcctgggtgcttccatttttaaatgactgttctctatagaaagagaagtttgcaataacgaaccctgtacactatctgagctgctagtgtcaaagctacagaagtggtttgctggggagaatagcttttctgggttgaacctagttgtcatctatagtcctttttcatttgaaggaacatttaaaacaatacgtccctttttagtaggaatatagttgaaacttcaagattggccaggggtgctaattgcttaagccaaatgttattagaggttcctcatgttattctttttacttttgtatgtgtttaaaatttctcataataaaaagtgttgcttttagcttactttctaaataggttcttcatagattttttttccaggttatgtcttgtagtcgttctaatattctctgattaaatgctttgtcattagtctgagttgcatttatttgctatttctgtatataatcaaattttagatttggagtcagttcagtacaaatagcatactaaaattcagagacactggcaaaaggagaaaattttaaagtccctaaaaatgcatgccttttgtatagaagtttgtgcttataaatacaagcaattaggatgtgcttaatgcagtcaaacatctgtagagagatacaatggtttaattaaataatggtaacagttgctttatggataagaggttttcaccagtctggggaactgccagtatctttagtgggagaggtatatctgcttcagtaaattatgcttccaattagaattctcttttatgggtgaaaatgaggaagaatggagtcatgctgagaagaaggaatgctatcggtgaaggggaaaattgacattaaatttgtgagcagtaaactgtgaccagagcatagggttcatcatgcttgtgagttctggccctggccttgtatcttccattgtgcttccctgaggcatcctgtctgttcatgctactttcccactaacttcagtgaatcccaaattcatgggtctagccacagccagcgtactgaatcccagtgccatattccagaccccaaatatcccatgtgcctctgaacctgcaatcaatgtgtataacactcatgtccttctggaaatttacttgttttacacactctattctgagttctcttggttggcctaaactatccatgatgccttcctctccctcacccattatttcttattagttgcaagttctgtatatttggccttctgtgttcatgtgaaatctctgcacatcccctacttacctgagatcctgtcctctcatcagtgtcattagactcccagccagtcaccctacctcttatctcacattggccccctcccacttcaattcctccttttcggaactatgcaagttcccttaaaaacaaaagacaaaacaaaaaaaacagctgcaggccggcggcagtggatcacctgaggtcaggagttcaagaccagcgtggccaacatggtgaaaccccatctctactaaaaatagaaagattagccaggcatggtggcaggcacctgtaattcccagttactcaggaggctgaggcaggagaatcacttgaactcgggaggcagaggttgcagtgagccaagattgcactattgcactccagcctgggcgtcaagagcaaaactccgtctccaaaaaaaaaaaaaaagaaaaaaaaaaagctgcttgtggtttttccttgcttgaaaagttgcacctttcaagattcaagtaaaatgcccaagtcctataaaccctttctaatttgcatagagaacggagaaaagagctggcatttgagtgacaaccatgtaaccaactaatgagtgcctctttgtgataatgctgatggtcacattctttctttatgaatgttccccgttgaggtacaggaccgccatatagagatgtggcagtggcaggtggtttagggtaagagtggagactgataattttattctacatcccactcaaggagccaagccctctggcattgtgcacacccactggaagtgggctgttcttgcatttcacacaaaggcagcatatgggctagtgaagatactcggaaattcagtgatagcatccccagtttacagttgaagaaattgaactttgaacctaagagagtttgccaacttgcccagcccagatagtaaagtgatgaaagtggggtggaagccaagacctgccagaagtccaaaatctgtgttctttctgctgcctattttcctctctgaagtggaattttcccctacttaacctcaatgtgaaagcactgggtatccacctccaataccatactctaacttggagtaaattatttgtttatatctctactaaccctccatcctgtgaactcttccagatatatgttggtcatccttgcctcctcaagatccagcaaggaccctggtactttttagatattagtaattataaatataaggttgaagccagtccccaggataaaaaggcagatgctccttaacttggactgatgaagtgggctcctccgtaaccctaaagacctgaccaaaactccttccttgacatctagcgtaagcaccacacaaaacaaatttctttcctaggccacagcatcctctaaagctgtgattgatcaagctaactaaatggatgtggttggccaagataacaaagcataaatcagggttctgaggacctttattaataaaattttacaacatggtccttctttgtaccatgaccctctgctatttggtcatctacttgatttaattgtgctgtcctgtttgaccgccaaccacagtctgaagctattcccatgacaaataagtgtgaattttcaagtgtcctgttgtgttataaaaggcccgtgttttattttataatttcatatttttttcattcaattttaattattatgtgcaagttcccaggctcagtcatttattaatgtttttattttttaaaaagttattttcaggcagattatgaagatttcttgcaaagaatggcctcaggcattgtttgtatagagataaaatctcctcttttaaatcactatgtaggtcttcattaatattttttcattcaacaaacgatggaatcattatttcagtgaaactatggctcctcttcagtgttcatattctgctttaattatttattaatccttcaaaagggcagaatcccttcatcctttcaacctttgctttgtcaaattgttacttaaaaatgattggtgttttctttgtcctttgtaatcttccttaaatctctgctaaaaggattctattctactctttgtattggcactgaggttatttatcaaagtgtgcttctctttgcagctacctcaaggctaaaaatgtagctcttttcagagatggctgttttacagaatgctataataaccaatttatgagaaaggcagtaggaaataaagagggaacaaaggcataattgtttcatacccattttttttcttctagcattcaaaattaataaaaacatgaattattataaaccagatgcgggaaagatctctggctgaataaatccatagtgaatggggcaggattgaaagatatggcggggaatcaagaaattcgcaataatgaaaggatgcttattttttattacaattttactgtggcctcttgataaaatgttccactcttcaggaaaaatgcagcatggttatttcaaagacagtgtttccatattctgtttctaataagcctgttgatttgggggtttagtgggtccaaagtagactaggtttaaaatagaatatttatagcacttcccagcccaacaaaatagaaatttaatgttattgagaatttcaagtatccttatgtgtaattgttagtcaaggatgaacatcaaaaaaaaaaaatcataacagcaaatagagagctgtcactttgttcttataagaacataggtgtgactttgtttttcataagaaatgacttttaaatgtatatagatttaatggtttacagctgacttaagtatttggacataagaactttttttttttttttttttttgagatggagtcttgctcagtcacccaggctggagtgcagtggcgtgatctcggctcactgcaacctccgcctcccgggttcaagtgattctcctgcctcagcctcccaagtagctgagactacagacgtgtgccaccacacctggctaatttttttgtatttttagtagagacagggtttcaccatgttggccaagctggtctcgaactcctgatctcaggtggtctgcccatcttggccccccaaaatgctgggaatacaggcgtgagcccccacatctggccaagaacatttatacatattatcaacaaccaaagccttgttcccccattggtttcataatagtctcagagctccttattcatattttccctagtgttattaagtaacagacatgaggcctgtaagtttagctgcctgtgtctaaatgtatatctttgacccaagacaatttctctttcaaaatagaaccactcatttataaatgaaaatgctttgtcaaatgaatggcaaagtacggtatactattaagacagcctcctagttttctgacatttggactgccatgttgaaatgtctccacacagcaagatacaaatgtgtgaatgccagtacacttcataccttaggtccccaactggtctgtctgcagacttgaggttacagacctgcaggtgtcgaactcaccccatagtggtggttagtagagtgctttgtatacgtttagctctctatgccttttttggttgtgatattaggtaagctctctttttcttgctttggagcttaattatggaatctgtaaatatagtgcatatgtcatccagatgatctgtggaagtcattgataatgacctttaaaaattcacatgtaatacagcatccgttttcctgaatgatttttatagttttaccattggcaaacagatactttcttttatgtatttctactccataattttaggaaaaagtaaatccttttagctacattaaaaagaatacactttctaggaataatgaatgtaaaaaaagtttccttttttaaaaaaatattgcgctctctaccattctggcagacaaattgttgaccttaatatgtataattcagtgcagtatattgatcttgtttattgtgctccaaatggacgctggcagaaatttgaggaattaaatatcaaccacagtgttttcttcatgcgattgcaatggtttgttatggattattttgttcagttcaaataaatgatgtacgttcagattctttgcccaattttttaattgggttgtttaccttactttcttaattttatttttatttttatttttatttttatttttggagacagagtcccgctctgtcacccgggctgaagtgaagcggcatgatctcagttcactgcaacctccgccttacggattcaagcgattctcgtgcctcagcctccccagtagttgggattacaggcacatgccaccacatccagctaatttttgtatttttagtagagacagggttttaccatgtttcccaggctggtctcaaactcctgagctcaggcaacctgcccacctcggccttccaaagtgctaggattacaggcgtgagccactgcactcggcctgctgttattattgagttgtaagaatttttatatattctggatactattaaattcttatcaaatacattatttggaaatattttacccattctgtaggttgtattttcacttccttaataggatccttttgacacacaaaaattttcaatttagaagtctattttatcagttttttcttttgtggcagttactatggtatggtatctaggaaaccattgtccgaaacaaggttacaacgatttatacctgttaccttctaagagttttgtagttttagctcttacagttaaatctttgattcattttaattttcatatatggtgtgaggtagaggtttgactttattcttttgcatataaatatccagtgtcccagcaccatttgttgaaaaagactattcttgccaggtgcagtggctcatgcctgtaattccagcattttgggaggccaaggtgggcagatgacttgagcccagaagttcaagaccagaatgggaaacatggcaagaccacatttctacaaaaaaattatccaggcatgataacatctatttgtagtcccagctactcaggaggctgtggtgggaggatctcctgagcctggggtggctgaggctgcagtgagccttgatcacgccacctgggcaatagagcaagaccctgtctcaaaaaaaggaagaaaaagactattatttcccccattgaatggtcttggcactattacacaaaatcaattgtccatagataatatgggtttatttcttaattcttagttcttttctttgatctgtgtgcctgtgcttactgtagtaccacactgttttgattattgtagctttgtagtaaattttgaaatcagcaagtgtgagtccgttatctttgttcttctttttcaatattactttgagtatccggagtctcttgcattacaacatgaattttaagatcttcctcaccccctgcccccactaccatttctgcaaaaaaaaaaaaaaaaaaaaaagtgcggattgcattggatctgtagatcattttggggaatatttatatataatgttaatgaggttttaaacaacacttttatctactagaactgatatttgcctcgaaatgattccaccttgagccccattcaggaacgttagtattttagaagtagcaagagaactgatttagcatgctatcatcttttactccaaattttggtgagattccagagaaattatttgtgagcttttccttaagccatgatgactgacatgtcagtagtttttgtctgtttttatgccattcttttatttttgtgcatgtgtgggcacctcaaccaaatggatggagcctgaggcatggtctcccacgccaaagtctgccgtttcttttgatgatccaatgcagttccaaagctattttctcaactcaccagctcgtttgtatggccctgtaatttgaaacaaaatctaaaaagaaatccaaattaaaatgattgggaagtgaagtcagaccacagtggtggctgtggaactacttcctggcatggaacactagagcagatgtgtcctgctttttttgtagagtcttgggaacaaccaatgattttagactggaacaagggctggttattctgtttttcacaagcatctgccttcaaggttcattttttaaaagaggaggggaaaaaaatcagtgatgtttgccaccctgagtatggagatgaatccaaattgagattaattttgaaatatgtttcccgaattttgagattaattttgaaatatgtttccacaaacactaactgggaatgacatgagtttgtttcatgtgagacggagtttggaagacatgttaatttgcttgttggtgttcaactcagaaacaaattttgcatgtattttctgagtaagtgccattattagttaacagttttcctgccgtatgcactatgggctgctttagaaagtaaatcatagaaggttagttataatatctcatcaaaaatagtggatccatctattaaccggttccaagttatgagacgtgtccaaaggaatgttgacttggtgtgcacctaaacactatttgtgaagaggctttggacttcgagcatgaaacggggtcagagggtcaaggccagggcgttacttaatttcagctcctgttgatggattcattgacttcagatagtgcgtttaaaaaagcctgtttaatgtgtttgtcttttgataattattatgtatttacatatgctcctaaaagcatgagttaaatcttatttctttgaaacagtgcttggcaacaacttgtattgtcttgtacatgccttttgtgtctttgcttttggttgggggggggcattgaaatttgtctgcccatcccctgagggcagatactgaggtgtggacctatgtcttcagcttcctgtatagcattgaagttgctatagctgcatgttctctaaaatttttatacatgcgatttaattgttaaagcttatgatttttaagtatagtattctgatagcaaatagattttgtcaaataaaaactaactttatcatcaccactgagatatcactaggtatatggcttagttctcagtcaccacttttatttgtaaggaagtcttagaagttttcacaagtgtatatgtgatagactgggcacagtggctcacgcctgtaatcccagcactttgggaggccgagtcaggcaggagttcgagaccagcctggccaacatggcaaaaccctgtctctactaaaaataaaaaaattagccgggcatggtggcacatgcctgtaatcccagctactcgggaggctgaggttggagaattgaacctaggaggcagaggctgtagtgagctgagatcctgccacttcaccctagccagggcaacagaacgagactccatctcaaaagagaaaaaaaaaaaaaagctgggtgcggtgctcacgcctgtaatcccagcactttgggaggccgaggtgggcagatcacctgaggtcaggagttcgagatcagcctcaacatggagaaaccccgtctctactaaaaatacaaaattatccaggcgtggtggtgcatgcctgtaatcccagctacttaggaggctgaggcaggagaattgcttgaacctgggaggcagaggttgtggtgagctgagatcgcgccattgcagtccagcctgggcaacaagagcgaaactccatctcaaaaaaaaagaagtatatatatgatgcttgctttagcagcacatatactaaaattagaatgattaaagagattaacctggcccctgcacaaggatgacatgcaaattttgtaaagtgttttatatggaactttacttacatgaggtacctagggtagtaaattcatagatacagaaagtagaatgctgattgccaggggctgagaggatgagggactgtggagttagtgtttaaagggcacagaggttcaatttggcaatattgaaaatagttcagtggggaagatggatggccgtgatgcatcgtccatcacattgcacagcatcgtgaaatatacttaataccctgagcgttacacttaaaatggttaaaacagtaagatttatgttatatatatttaccatgataggatatatatatgtatattcatatcattcgccattgtgaatagcaaggagattgaagaaataaggacacaggatcttcaataaatatgtattaaatgcttcccatgttccacattctttgtcattgccagacacgtcacaggtataagggcccaatctttgttactcaaataatttagaataatttagaatttgcttggggagactttggataaacagttaagaagctgtatccattaggtaaagggacattgcttgctgcgtctcgtagcatttggtagtctcgttagacagccgttcttactcctatcgtttgctgaaatttattagcaaaggaaagaatcttagttttcagctcgttcagccgcatgatttcataggctcaggaaaaccatgtaatatgcccaaggtcagacgtgatgaataagactaaagactgaatctattccagtgtctctgtgtccagtgatacttacttactgctgttgccaagttaaacaaaactgggtttgcagagctgtttattcaccttcagcatcttttcattgaaaatgcggtagatagaagaaatgtccctcttttagcatttgtacctcagtaataagatgcttcccaagctcaaagactccacacccttaaatatgtaagtcagtgttaagatatttaaagagaacatgaatatcagctacattgtgcatgttgcaggatttttatattattttgtatcttctgcttagaagtcataagccagcccatgaaccatgccaacaaacataccttcttccatgtgattattgcagccagatttttcagtgcaggacaagcaaagttttctctgaaagcatgagataataattctcagccaggtcttcgccatttgcaagggatcagacataagagtttttagctctgttgatgttaatagctagagcccctgttagcagatggcatgttagtggcctgttgctgctggctattaaatcatacacattggccaggcacggtcggtcacaccagtaatcccagcactttgggaggctgaggcgcacagatcacaaggtcaggagtttgagagcagcctgaccaacatggtgaaaccccatctctactaaaaataaaaaactaggcaggcatggcggcacatgcctataatcccagctactcaggaggctgaagcaggagaatcacttgagcccgggaggcgaaggttgcagtgagccgagatcacgccactgcactccagcctgggcgacagagcgagactccgtctcaaaaataaataaataaaaatattaaaagtaaatgatacacatcatgagatcatctcccaaggcagcagagaattttgcgtatttttttcttagtttatattgttgcaacagagtaattcttcttgatcacagactttgctttttttgttgttattgtttctaagtttcacttgatcctcaaaataacctgagacagacaaaacagataggttttcccattaatctccttcatgagtctgactttgccagccaggctgatcttatatccatagccctggatgcatttatttatgttattccatctgcctataatgcccatccccaatcttggcctattacatgtgtctaacattactttgatgtgtacatgtcagtgaattaccacttaactgattgttagctttttgagagtatgtatcaaatctcatgtgcatttgtgtgtcctgaaacaaattattaggtataaagtatgtattgcaaataccatgcccagggaatatttcagagctgtggttctccaagtgtggtccttagtctagcaacatcagcatcgcctggcatcacctgggaacttgttggaaaagcacattccatgatcccacccctgacctcctgaatcagcaaagctagggatggggctgagcaatctgtattttatcaagctgtccaggtgacattgataaatgctaaactttgcgaattactgatttagagactaatcaactcattaaaaagttaataaataggtgagaatccattgtagcaccccagtcacctatgctattatcttctaaattcacattatacaaattgtatgccacaaaaatgtttaaggtgaaaacccaaaggaattgatgcattggattaattcacaaaaatttaacagctgcaattcatagaaaaaaaatgcatgcatatctgataattagttgtagattaaaaggtgaacaacttcttattattaataccaatgaaaatgtaattttttaaaaattatggccaattggtagttttttaaaaatctgttatgccttgtcatgataaggataggtgaaaaggaactttcataaactattgctaagtatatgggtgaaaccttttagactatttgggtctacctaataaattaaaatgttcagtcttttctaattttagcaccgtatttctacagatacactggcatatctgtggagaggggcacttctgcttgtcacctgatatcccttactactactaatatttttataagcattattacctttaaaatcatgttaaagggtaaatgatgtgcaacagactcagtttccccttctctgactcctgtttagtttacatctcttttctctctctcatttgggggctcaatacccttaagattatagagaaattgcagtaggtaatgttggctggaaatgctaacttgtaagaaacttgggtggaaatggtttaagccatcagcctaaacgatcagtgaaaatgtcagacattctccgctttcttcttccaagatactatactctactgtggccttagagttcttaattcctatataattctgattaaaaaggaaggagatgctcctaatataccttgctgttgtcccctcctgttcattagggtagctgatgtcagtcaaaataaagtctagaaattcttgagtactttttttttttgtaatatactgagaatgcttgaagcaaactaaccaaatttaagtgttttaaggatattaacagtaacaggagagcccctcgattttctgctaagaatcaacctgaacagtttccagactgctggttggcaatgtcagtatcatgagaaaaactgaaaaaataagaaactttagagaaaaagaggaatcagtgcaggctaggggaatgaacttggtaatccagtagtctttccctgccagcattttgattgataagctaagtgtctgctttttctcatcccttattttttggcaggaaaccagtattttgatacttgaatgccttctttctatcttaagggagaagccttcttaaacttcaagtgtgaagtagatcctttaggtataggatgaaaaattaagtgggactatttgtgaattactaaatcgcaaccattaaagaaactaatgccctaattagcctgtcttttgacagacatggcatccatatgtaagtctaatattgtatgcaaatgtgagacaggttttgctttctagatctctttgatgtgaaaggaaaagctggcttcctggcttccttcccatgttctgtatggacctgccttcatcctgctgccaacagctcctcaagggaacatgaaagtggaattaaaccctcctggttttcagattcagaatcctgggtgattaagtggcttgatcaaaatcagaaactgtgaaagtgctaaaaatggtcaaggcccaaggagttcctcatgtgtggtcaaaagcctttcagaaatcaaagtgtgtctttaaatacctggggtgcaaaaatcagatgttttttatttaaagaaaaataggtatattagagcagaactgggggccctctgtaggagcctgagtctgggtgtttactgtcgtctaaggccttgttaatgtgggcttgaggcttcggaatccacgaacaggggaagctagcgtctctcgctgactccagtcctagctcgagctttccatactgccctacgtgacttctgcacttttgtgccatcagccagtagactgagaaaagtatctggtatttgtcggtgtcttcggtttagctgctttaagtccttggatggaaaaggctgattgtcatcctgaaatcattgtctcctaatgtgtaattggggccaagtgaagcacagtaatttagaggaattctagttaaaaatacagattcttgggctctacctcagacctacagagatctgcatttttcttattcccccaggtgatcctttaaacattcagaggtttttaaaactcatgcttatatgcaataacaaaaatataaggattcttagaaacttgttatatttgtcttgaacatgggatgacagacattgtcattttcattgaaaaaaaaaatgaagcagagactcagaatgtatttagagacaactctaaatacattctggcagagcctaactactggattgcagagatcctccctgcttcccccagtccccatctataaactggccatgtgaatttctagtggtgttcacttccaaagtggtgattttataaaatattacaatgaagcattattaacctcaagaagttcagatgcatagagagtttatttgggtgtggcagcattagtggctaggttttatttatccaagataagacttcttattagctatgaaaagggattggcataaactgcttattaatgtccattaactgtatctaaagggaataaacagtataaaaggccaggcatggtggctcacacctgtaatcctagccctatgggaggctgaggcaggaggatcatttgagcccaggagtttaagaccagcctgggcaacatggggagaccctgtttctacaaaaagtcaaaaaaataataagctgggtttaggggtacacacctgtaatcccagctagtcaggaggctgtggttggaggatcacttgagcccaggagttggaggttgcagtgaggcctggcggcaccactacactccaggctgggtgacagagggacgaccttatctcaaaacaaacaaaaacaaaaaactgtataagcataagatgggcttgagtcacaaaattctgcctttcataactttcccccatttgctgtttgatttgctgtttcagaaattgtgaacctacttctctacttatagaacatttacctccctcttagattcttccctttctatcattgatactgacattctgcttaaagaattatccatttaggctctcttcaaatccaaagtgatattattttattttaataagagatgaaagggaaaattgacaaaatgtgcctggagttgtcagcattgtaaatgatggactgtaaaagcttcgtcttggaagattgtcagagagcctagtgccagctcaaaaagtgtggtctttttagagaattgacagaaatgttacaaagaaaacatgtgctgaataccaactccaggtgcgaatcctgagaagcaactcactctattctgcagtaggagatgaattttgcaggttatacagcagagcaatttaaactcccttgtttcttaaagtatatcctatagtgacttgggatggaagtcatatactatccccttttttgttccttcaaagtaaatacaccacagagctggagatgtcccagacacagggggaagctgtttggatttttcccactgcctgtaatgaagcaagatagggaggaagaacttgggaacttgcgtggcaaatggtcaagtaaagaaaaagaaaagctttttctttacttgaccatttgtcacatgtgctttcaaatcctgaactgagtcacatctgaaataaatcacttccttgtcatttccatgaaaggggcagtacaagaaattccttgcacatccctggtgagccccttgttactctcagattcagctattgccttcaggaaaaaaagaaaaagaagccgaagaaagaaagaaaacagaatcctctagaaaaagctattctgacctgtgctctttcttttgtctgagtgtgactagataaatgcattagtctgctagggctgccataacaaaataccaaaataccacagactgaatccttcaacaacagaaattatttttctcatgcttctggaggctggaagtccaagatcaaggtaccagcaggtcggtttctgaggaggcctctcttccttgatttacaaatggccacctacgcatcatgtcctcacatggtctttctcagagagaaagagaggtgtctcttcctcttcttcttttgttttgttgagacagagtttcgctcttgttgcccaggctggagtgcaatggcacgatcttggctcactgcaacctccacctcctgggttcaagcgattctcgtgcctcagcctcccgagtagctgagattacaggcatgcctggctaattttgtatttttagtagagacagggtttctccatgttggtcaggctggtctcgaactctcgacctcaggtgatccacctgccttgccctcccaaagttctgggattacaggcgtgagccccgcacccggcctcctccttttcttataaggacacctgtcctattggatcagagtcacacccccatgacctcatttaaccttaattatctctttaaaggtctgatctccaaaggtcccttgagggttagggctttgatacatgaattttcaggggcacacagttcgatccatagcagttggcttattcatactttgggtagatcctcttcatcgttcctcagctactgtctatttagtgcacagcttctttatcctaaagctagtcaggggaggcatggaaggtattatttctcctgtttctgcacctaaggcattaaaacgaggttgtggtctggcagcctaaactcggccttgatgaacttcaaatcctagacctccttggtatgtgaagtgcatacacttgtatggagggatttgacaggttttttttttttttttttttttgagacagagtctcactctgttgcccaggctggaatgcagtggcacgatctcggctcactacagcctccgcctcccggtttcaaatgattctcctgcctcagcctcctgagtagctgggattataggcgcgcaccaccacacccagctaatttttgtatttttagtagagacggggtttcagtatgttgatcgggctggtctcgaattcctgaccttgtaatccactcgcctcggcctcgcaaagtgttgggattacaggtgtgagccaccgcgcccagcccagatttttttaaattagtttttagtgtatccacactgttaaagcaggtggatactgctggatagtataacaaagtatagtgtgacaaacccataaccaagcattgttagctatattttctcatgtcttgagccaaaaggtcacagttaacctaatgttgctactaaacactcataccataaaacattctattccagtcttccagattttacacaagaataaaatgaaaacttttagactactggagatttttttttaaatacacaatttgttgaatgtgaacgctaaattgaaattgacatgctaagttttatagattacttcagctgccctgacttcagtaaatttagttgtgacacaggtacaacagctgacttctttctggcattagaggtggtgatgtttcgtcactctggagttagtaaaacctgaaacccgccaggcatttgacacacagtttgctgccagggacagctcagcttctggcttattggagaggaaatgacctaacctctgtgtttacaaagtgtttgaaactgaggcccttccacttccttgctgagtgtaagggttgacctggcatccaaaatccccatgatcttctcaggataagtcatgcagccattggtggtcaagaaaggatttgttccctgtggaagggcattggaagaggaacagagctgaaacacacgggtgttcagagggaaaacatctctgcacttaagagggctagattagactattagactattatcatagagctcgtgattcatctcctttgtttaattccagccttgagtaaaggactcactaagaaaccacattcggccgggtgttgtggctcacgcctgtaatcccaacactttgggagaccgaggcagatggatcacaaggtcaggagttcaagaccagcctggccaatatggtgaaaccccgtctcaactaaaaatacaaaaattagtcggggatggttgcgggcgcctgtagtctcagctactcgggaggctgaggcaggagaattgcttgaacctgggaggaagaggttacagtgagccgagatcacgctactgcattccagcctggtgactggagcgagactccatctcaaaaaaaaagaaaccacattctattccagtatatttattataaccagaaattcttgtcttatcagcaaatagctaatattcacttacatgggcagtgtattagattcctagggctgctggaaccagttaccacaaaccgcatggccgaaaccaacagaaatatactctcattatctcattattctagaggttagaagtcctaaagcaaggtgttgccagggccacactgcctcttacagctctaggggagaatctgtttcatgcctttcgcttgctctagtgctgctgccagcccttgatattcctttggttggtacatgcacccctccaatctccacctctgtcttcacatggtgttactccccatgtctctgtttctgtgtcttctctaatatgattaagggcccacccttctccattgtgacctcatcttatatctgcaaagaccctgtttccaagtaaggctgtattcttaggtgtaggcattaggacttcaacatatattttgggggaaaattcaacccataatgcggttatgtttttattttccttgacttttaagaatgtgaactattgtcaaattttttcaaccactatcaaatttaaatctaagaactacatgtcttaaatttatgacctcttcattaaaaaaaaaataataacatttaattggtaccaaaacgtgaaagagtttaatgctttgcatttgcttgaggctgattaatgagtaaatgtgtcaactgtggctgttttaattagccagggttaattaatgtttaccacacttggaagatgaaaaggcatgtataaatgctctataatgtgaatcattttttaatttgttgttgaagcttatagtgtagccaagtaaggattgcttacatcatacttacaaagggaggttcattaatggatacaaatacacagtttgatagaagaagcaagacctagtatttaattatcagcaaggtgactaatttacagtaatctactgtatatttaaaaatagctaggagaacctaatttgaaagtttctagcgtaaagaagacaggctgggcacgatggcttacacctatagtcccagcacttgggaaggccgaggtgggaaaatcacttgaccccagcaattcaagactagccagggcatcatagtgagaccccatctctacaaaacaaatatttaaaaattagccaggtgtgatggtgcatgcctgtagacccagctgctctggaggctgaggtgagaagatcacttgagcccagcagttcaaggttcaagtgagctatgatcacatcactgcactccagcctgagtgacagagagagacccttcctcaaagcaaaaagaaaagaaaaacatttaagtgatggatatcccattatactgatttgatctttccaaattatatgaatatattaagttttctcatataatctgaaaatatgcacatctattatgtatcaataaaaaataaaattttaaaaatgtaaaaaacgatgttggagcactatggtacttaacgtagaggctctgacttttgaggtacattcattacctgttactgaagttgagtatgctttaatattgtatgtttagaaaaggtagttacatttttaaatctgattgtgtaagaagaaaagagtagaaatgtttggggccaagtcaataattatttagtatatcataatttgagatgaaatgtgtttttttttttcttttttagtttcaagttgaaacattttaagaacagataaggaaaggctaactgtgctgagatgaaaataacatttttaaagtaactatcttaaagaaaatacatttctagaattttgtgtaaattttcaacaaagactcagaagcctggatgaggtcttgtgccaagactggaaagtgtggggattagaaaaagtttgaagagattgttgtgagatcctctcgtatgaggcctgaagctgtacatccatggaaagcagttaccccaggcgggaaaacaggttatccattctcgagtgagtggccgggtgggaaatagtccatcatgtcgaatggatcgtactttccagcaccaagatttgtggttctctaggtgaataagatgacaccccttcacttcacttcacttcaccattgtctgcatggagtacgtatctaaaaacaaattagcaaaaaggttgggtctactttacttttcatctcctacactattttcttctttgttctcggcaggaaaagatgaagttgcattttattattatctcataggattcttattctaaaatgatttgatttaaaacccattgcactttatttggataaaaaatgcttcactctctagttcttaacaataacaccagcctgattttattacgttaagcactgcaattagacaatacaaagaatttgcagcaacaacatgttattttatcatgggtggaactgttcattgtctagcagaatttattaccagataaatcccttttggggaatctaatgtggatgtttttttcaaagcgcctgtggagttctgctagtattgggaacgtttccattttcattctgatgcttccctgtgggctgtttcagcatagaagtgagctctctgggtccatgtttccattggctccacccaatattctgaaagattgcaactcaacatgtgtaaacagaacctttctcccccatattttctcttttcgtagattaaactcaggtcaagaattagaagtttatcctccaccccgatagcatctcgccctatcccaaataccgccaccaaaatgcccactgtttttccttgggccagttcctgaaatatctttctggctgtatcactcttgtgtgcatccttatcggctatgcttttggccattttttactgctgacttgtctggttagtcttttataatctccaggcttctcctccatcctttttttacagtttacctgttcatgaagcgcaggtcacttgacccgtagaattcccataggctgggattttgctaattgcatactcatggtataggtcagtgtattcctctgccctctgtatcccacaaactgaaagcctcttggctaagctgcttcccttttcacttcccttgtaccacagcagccagaagagtcacagatcctgggcagcttgtcctctgtgcctcggtacatgcacttgtatctgctaggacaatgatctctttccctggggccccactgtaatatcactagtcacatccctaaagcccaggcttgtttctttgtcattctgtcggtatccctaccataacacttgtaatagtaattatttttatgcccatcttttcttctgaaccatgagcccttcaagtgaaaagaaattgatgaagttatttctagcactcccctggaaaaaggaaggcaggcagggagggaggggctcactagtttatgataaagtggtttgattttcttggttgcagattatttcttttaaagtgactcttttcagcttctctcactcctgtgcatcgtgaatgctctcctgaagacagacgctttccattcatttccaagccccccatgtgaagtgctttctgttgccaggcttggtttccccacacgttgttaaagaagttaaagaagcttgtgaataagctaaagcagaggagaaagaaccattgctatatctagaattgttcaccagaaagcaagttttgtgttaaagaaaacacgagtaggccactgtgcagaagtgcttacagggtttgtgtgctttttaaaatctgcataaataaacatttcaaatgagctatcatatatacaaggatgatgtgctgtctgtgggaaaaggacccaatcctgtgttgtgattttacatatatatatatatataatttgtgctattacacacttgcctgatccccttataattatctgcataagtctttttaggctctttgaatgaaattcactatgtatggatgttgaaaatcatcctttctaccatgagctcatcagacttgctaaccaattctttgcatcctttgaagtataaaattccatcaattcagcatgtatcaacatgaatcaattagaatgcactttcttcacagcatggcggagtttttgctggctgccgggaggggcactgtttcccaattcattcatttgcttgggcccgccccaggatccttcttatcccggtcagatagacttctctcatgagcttgagagacggggctggtcacacaggacacggctttagggacacgactcactgaaactacaaaatgagtgctgctcttagagttgtacccacagcctgcacagctgttatggcaatgctgtgggcaagtcttgctacggcccattctcctccctcccttgtcctgttggaaggttcaggttggagctgaaattcagtccagcacgcagctggacaagccatgtctcctgtatgtgactcactccccagagaaagcatcatgtggactagtaagggcttggctttatcagaagcaaaggagaggtttacatctcttcttgctctctcttagtgggttcagagctccagcagaaaaaatgggacactgtggattgatctccagaaaaccccaaaaccagcactgaaggctccaggagattatgcctttagattgtatacaggcaccagaatgacttttgcctttataaaaatgcgtgcaagagcatgaaaactaatatttgaggaatttttttttctcactgtactttctggtcctcactgaaagcattggcagttttaaaaaatgaaatgtgatactgttatagacgtagcaaacctcacgtttcattttttccaattcattctatatctaggaacttacttagaaggagaaacaaactgtacccagaaaaaggaatgaaactggagaattcttcctcatgattcctctgtgtcctcaggcctaattatcctcattccaaagactctccattgcctcaataacttcgaaaaatttactctccttaagcatagtcataaaaattgcatagtaaagtgataaagagacgaaaataatgctgtaagaataaaaccattaaaaaaaaaccactactcttgattatttctgctgttagaattgtaaatgaattctcattccttttttctacatttttggcatgaaatttatgttactcttataattagtaaaaacattatattttattaataaaagaagactcacagtgaagtcataacatatgctgcagaggttagactcttcaagtcagatttgaagagagaatttcacgtaacaatcaccttgaaatgtcttcaggtcagccatcaaagtacacatctctcaaccagccaggcagccagtttttcctccagcatgtgaagagtgaagagatagctgtttcttggcttaaagaccatatgaaataattgacttatgtttaaaagatatgagggatcaggccgggtgcagtggctcatgcctgtaatcccagcactttgggaggccgaggcgggtggatcacaaggttagaagatcgagaccatcccggccaacatggtgaaaccctgtctctactaaaaatacaaaaactagccgggcgtagtgatgcgcgcctgtaatcccagctactcaggaggccgaggttgccatgagccgagattacgcctctgcagtccaacctggtgacagagcaagactctgtctccagttaaaaaaaaaaaaaaggcatcaaaattacattcacttctatttttatttttgtttgtagaagacatgcagtttgtatcacattaatgggcatatgatgtaatttcactataaatcgaaccagaggaagacatccaaatatgtataaattaaagctgacaatgcctacagtactaaactttttgttttagtataattggagacttagaaaagttctaaaaatatatttaaaaatttttaaaggaagttgcagacataatggccctttacacctaaatacttcactgtacgtttcctcaaaacaagaagatatgtgtgtgtgtgtttgtgtgtgtgtgttgtaatcttaatacagcatctttcagagattatttctgtagtatataaacttggtttttttgtttgtttgtttgtttgtttgtttgttttgagatggagtctcgctctgtcgcccaggctggagtgcagtggcacaatcttggctcgctgcaagctccgcctcccaggttcacaccattctcctgcctcagcctcctgagtagctgggactacaggcgcctgcaccatgcccggctaatttttgtatttttagtagagacgcgatttcacctcgttagccaggatggtgtcgatctcctgacctcgtgaaccgcccacctcagcctcccaaaatgctgggattacaggcgtgagccaccgcgcctggccataaagttgttttttagtctctactttaagttcctgacaacccaggcaggaccaagactccctaatgtagttggaaatcagatcagcacattggcacaagttctacaggtaaacgggaaaaaggagccctacaatctgcttttagatgccagggagcctggctggtctttatcttgattactgactgatgccactggtaggtctaagttctttgatctatgatgtttgaaagccaaaaggaaatgtgttttaaaggaaaagggacttcttctgtaccctcagtctaagccagacaagtgatatttcaggaaaatgtccctagcaataaggaatattttcacaaatgatgtgaagctttgtttgtgtcccttccagggcagtttgttaccataaggggacaaagcatgcttcatttaaacatgtgtggccaggaaactgttatttttaaacaaaaataaaccccgatttagacatgtagtctgagttttaactctgggagattttcaagattgatagtgtagctaaaaataactgacctaattttctggaggtcaagataaaaactggatttgtggtacagcatttactttgtgataatatgtgtataaattcttccccaagttggaaaatgtggccgcgtcatacagggctgtatctctcttgaccattgaagtgcctaggtcgctacactacaatttgacttagagttggtgaaacttctggccattcacgtagccatcgtattcatcctgagaaagggaaacctaaagacttgggagagtgttctgggaggaaagtgctattgagaatgggctgtccaagcaaagtgacaggcaggcctcacttagctagaagagggagcttttcagccctgctccaccatcaggaatctccgtgaccttggactactgctttaatctcttttatcctggcttctaaaagataccgtcgaattcattctttttcaaacctatcaaaaatttgaaatgtatgaaaaagagggtgcttgtgatgatagatgggtttatgcttccttttttttttttttttttttttttttgagacggagtctcactctgttgcccagactggagtgcagtggcgcgatctcggctcactgcaagctccgcctccggggttcacaccattctcctgcctcagcctcccgagtagctgggactacagtgccaccaccacatctggctaattttttttgtattttcagtaaagatggggtttcaccatgttagccaggatgctctcgatctcctgacctcatgattccaaagtgctgggattacaggcgtgatatgcttctttaatattagtttctaatccaagtaatatagccatgtcctctataaaatggaacttttcatggaacagtgagaaggttgcattaggaattgggatacttgggttcagatttcagttctgccacttgctagttttaagtatacttctcaggatggatgtcagtttgttcaactgtcagtgggagtagtgatcccactaaggaagattattgtggttatcaaatcagcagatgggtatgaaaaggccatgagtgcagttctcatggttatgaaggtgtcataactggcatagtcccatcacagtatggctttggcatcgcagatggctgtagcatatatgctaatcagaacatccctaccgtccttaaagatctcatgggttctctcccaaatcagctgctccaccgacctacaagtaagtccatgcttctttagtatatttactcactagtgaaggcccgtctgctaaaagtgtcttcagtaggggagagctgctcttttctgggaaacccagcaatgaagtttgtcctgtgatgccctctacacttactgacctgtttcctgagaacttcccgtaacaaatggtccagggaagaaggaagtctgtgaccagtctttcctttcctgtggctttctggttcagaaatgtgaccctgatgataagaaacttcaaggcatgactctggtgttttggcaatattcccctggcagtattgtttcttggctcacactcatctcatgccttgctttgtttgctttgtttttgagaattgtttttttgtttgttgtttgtttttggttttggcttgtgagacagagccttgctctgttgcccaggatggcgtgcagttggcacaatctcggctcactgcagcctccacctcccgggttcaagcaattctcctgcctcagcctcctgaataatggggattacaggcacacaccaccgtgcctggctaatttttgtatttttttagtagagacgggtttcaccatgttggccaggctggtcttgaactcctgacctcaagtgaaccacccacctcggcctcccaaagtgctggggttacaggcgtgagccaccacgcccagccattatgtttgtttttctttcatgaagggataaccgaggctgttgtgtggtggtgtcttggtacagctcgtggctgtggtcagtgtggtggagggtaggtcttctcagatggtaacatgcatgagagtcacctggggatcacattaacatgcagattctgattccctggatctgggtgggacctgaggttctgcatgtctaacaaactcccagagaacacccatgtagcaagagtacagacaaaaggattcaaagcgaagggactgcaagaaccatggaaccagcctcccacgattttgcggatgacgaacccgagccttggggagtttcagaggccatggagagatgaagtataataaacagcatagcagttgtatgttgagccaagaatcagacatgcacagaactgctgattggaaaattaaatctgtttctcatagccctggtgtggcaaaatgcctagctggaagtgggtgaccgcttgatttacagtgggcctcctgggtagggaaaattagtccatcccatttacagctacttccaatgcagctgtgtcaggggagagagaagaaaggacatggaagagagcgtagaggtatgatcttcagtcctttcaggcaggcacataagtaaatttttatttaaaagataagaattggtcatatgcgaatctcctgttagataagattaaaaacaaatttccattttgtggagaagttgcagataaatatttttccatgggatccaaaagaatcaaaaaggaaagaaaatagtaatagcagtggaggttcgatcctagacagaagaaaatccagcaagccgagggacttcatattctcactggtgtccaaatcagagctttttttttttttctttgtttactttaagttctgggatacatgtgctgagcatgcaggtttgttacataggtatacatgtgccttggtggtttgctgcacccatcaacccgtcatctaggttttaactccgcatgcattaggtatttgtcctaatgctctccctcccctttcaccccacccctggacaggccctggtgtatgatgtccccctccctgtgtccatgtgttctcattgttcagctcccacttatgagtgagaacatgagtgtttgggtttctggtcctatgttagtttgctgaggatgatggcctccagcttcatccatggccctgcaaaggacatgaactcaacctttttttttttccttttttttttttttttgtatttgcaaattcaaatctttttttttttttattatactttaagttttagggtacatgtgacattgtgcagcttagttacatatgtatacatgtgccatgctggcgctgcacccactaactcgtcatctagcattaggtatatctcccaatgctatccctcccccctccccccaccccaccacagtccccagagtgtgatattccccttcctgtgtccatgtgatctccattgttcaattcccacctatgagtgagaatatgcggtgtttggttttttgttcttgcgatagtttactgagaatgatggtttccagtttcatccatgtccctacaaaggacatgaactcatcattttttatggctgcatagtattccatggtgtatatgtgccacattttcttaatccagtctatcattgttggacatttgggttggttccaagtctttgctattgtgaataatgccgcaataaacatacgtgtgcatgtgtctttatagcagcatgatttatagtcctttgggtatatacccagtaatgggatggctgggtcaaatggtatttctagttctagatccctgaggaattgcgacactgacttccacaatggttgaactagtttacagtcccaccaacagtgtaaaagtgttcctatttctccacatcctctccagcacctgttgtttcctgactttttaatgatcgccattctaactggtgtgagatgatatctcatagtggttttgatttgcatttctctgatggccagtgatggtgagcattttttcatgtgttttttggctgcataaatgtcttcttttgagaagtgtctgttcatgtcctttgcccactttttgatggggttgtttgtttttttcttgtaaatttgtttgagttcattgtagattctggatattagccctttgtcagatgagtaggttgcgaaaattttctcccatgttgtaggttgcctgttcactctgatggtagtttcttttgctgtgcagaagctctttagtttaattagatcccatttgtccattttggcttttgttgccattgcttttggtgttttggacgtgaagtccttgcccacgcctatgtcctgaatggtaatgcctaggttttcttctagggtttttatggttttaggtctaacgtttaaatctttaatccatcttgaattgatttttgtataaggtgtaaggaagggatccagtttcagctttctacatatggctagccagttttcccagcaccatttattaaatagggaatcctttccccattgcttgtttttctcaggtttgtcaaagatcagatagttgtaggtatgcggcgttatttctgagggctctgttctgttccattgatctatatctctgttttggtaccagtaccatgctgtttcggttactgtagccttgtagtatagtttgaagtcaggtagtgtgatgcctccagcttcgttcttttggcttaggattgacttggcgatgcgggctcttttttggttccatatgaactttaaagtagttttttccaattctgtgaagaaagtcattggtagcttgatggggatggcattgaatctgtaaattaccttgggcagtatggccattttcacgatattgattcttcctacccatgagcatggaatgttcttccatttgtttgtgtcctcttttatttccttgagcagttggtttgtagttctcctttaagaggtccttcacatcccttgtaagttggattcctaggtattttattctctttgaagcaattgtgaatgggagttcactcatgatttggctctctgtttgtctgttgttggtgtataagaatgcttgtgatttttgtacattgattttgtatcctgagactttgctgaagttgcgtatcagcttaaggagattttgggctgagacaatggggttttctagataaacaatcatgtcgtctgcaaacagggacaatttgacttcctcttttcctaattgaataccttttatttccttctcctgcctgattgccctggccagaacttccaacactatgttgaataggagcggtgagagagggcatccctgtcttgtgccagttttcaaagggaatgcttccagtttttgcccattcagtatgatattggctgtgggtttgtcatagatagctcttattattttgaaatacgtcccatcaatacctaatttattgagagtttttagcatgaagggttgttgaattttgtcaaaggctttttctgcatctattgagataatcatgtggtttttgtctttggctctgtttatatgctggattacctttattgatttgcgtatattgaaccaagccttgcatcccagggatgaagcccacttgatcatggtggataagctttttgatgtgctgctggattcggtttgccagtattttattgaggatttttgcatcaatgttcatcaaggatattggtctaaaattctctttttttggttgtgtctctgcccggctttggtatcagaatgatgctggcctcataaaatgagttagggaggattccctctttttctattgattggaatagtttcagaaggaatggtaccagttcctccttgtacctctggtagaattcggctgtgaaccatctggtcctggactctttttggttggtaaactattgattattgccacaatttcagctcctgttattggtctattcagagattcaacttcttcctggtttagtcttgggagagtgtatgtgtcgaggaatgtatccatttcttctagattttctagtttatttgtgtagaggtttttgtagtattctctgatggtagtttgtatttctgtgggatcggtggtgatatcccctttatcattttttatcgtgtctatttgattctcctctttttctttattagtcttgctagcggtctatcaattttgttgatcctttcaaaaaaccagctcctggattcattgatttttttgaagggttttttgtgtctctatttccttcagttctgctctgattttagttatttcttgccttctgctagcttttgaatgtgtttgctcttgcttttctagttcttttaattgtgatgttagggtgtcaattttggatctttcctgctttctcttgtgggcatttagtgctataaatttccctctacacactgctttgaatgcgtcccagagattctggtatgttgtgtctttgttctcgttggtttcaaagaacatctttatttctgccttcatttcgttatgtacccagtagtcattcaggagcaggttgttcagtttccatgtagttgagcggctttgagtgagattattaatcctgagttctagtttgattgcactgtggtcggagagatagtttgttataatttctgttcttttacatttgctgaggagagttttacttccaactatgtggtcaattttggaataggtgtggtgtggtgctgaaaaaaatgtatattctgttgatttggggtggagagttctgtagatgtctattaggtccgcttggtgcagagctgagttcaattcctgggtatccttgttgactttctgtctcgttgatctgtctaatgttgacagtggggtgttaaagtctcccattattaatgtgtgggagtctaagtctctttgtaggtcactcaggacttgctttatgaatctgggtgctcctgtattgggtgcatatatgtttaggatagttagctcctcttgttgaattgatccctttaccattatgtaatggccttctttgtctcttttgatctttgttggtttaacgtctgttttatcagagactaggattgcaacccctgcctttttttgttttccatttgcttggtagatcttcctccatccttttattttgagcctgtgtgtgtctctgcacatgagatgggtttcctgaatacagcacactgatgggtcttgactctttatccaacttgccagtctgtgtcttttaattgcagaatttagtccatttacatttaaagttaatactgttatgtgtgaatttgatcctgtcattatgatgttagctggtgattttgctcattagttgatgcagtttcttcctagtcttgatggtctttacattttggcatgattttgcagcggctggtaccggttgttcctttgcatgtttagtgcttccttcaggagctcttttagggcaggcctggtggtgacaaaatctctcagcatttgcttgtctgtaaagtattttatttctccttcacttatgaagcttagtttggctggatatgaaattctgggttgaaaattcttttctttaagaatgttgaatattggcccccactctcttctggcttgtagggtttctgccgagagatccgctgttagtctgatgggcttccctttgagggtaacccgacctttctctctggctgcccttaacattttttccttcatttcaactttggtgaatctgacaattacgtgtcttggagttgctcttctcgaggagtatctttgtggcgttctctgtatttcctgaatctgaacgttggcctgccttgctagattggggaagttctcctggataatatcctgcagagtgttttccaacttggttccattctccgcatcactttcaggtacaccaatcagacgtagatttggtcttttcacatagtcccatatttcttggaggctttgctcatttctttttattcgtttttctctaaacttcccttctcgcttcatttcattcatttcatcttccattgctgataccctttcttccagttgatcgcatcggctcctgaggcttctgcattcttcacgtagttctcgagccttggttttcagctccatcagctcctttaagcacttctctgtattggttattctagttatacattcttctaaatttttttcaaagttttcaacttctttgcctttggtttgaatgtcctcccgtagctcagagtaatttgatcgtctgaagccttcttctctcagctcgtcaaaatcattctccatccagctttgttccgttgctggtgaggaactgcgttctttggaggaggagaggcactctgcgttttagagtttccagtttttctgttctgttttttccccatctttgtggttttatctacttttggtctttgatgatggtgatgtacagatgggttttcggtgtggatgtcctttctgtttgttagttttccttctaacagacaggaccctcagctgcaggtctgttggaataccctgcagtgtgaggtgtcagtgtgcccctgctgggggtgcctcccagttaggctgctcgggggtcaggggtcagggaccacttgaggaggcagtctgccgttctcagatctccagctgcgtgctgggagaaccactgctctcttcaaagctgtcagacagggacatttaagtctgcagaggttactgctgtctttttgtttgtctgtgccctgcccccagaggtggagcctacagaggcaagcaggcctccttgagctgtggtgggctccacccagttcgagcttcccggctgctttgtttacctaagcaagcctgggcaatggcgggctcccctcccccagcctcgctgccgccttgcagtttgatctcagactgctgtgctagcaatcagcgcgattccgtgggcgtaggaccctccgagccaggtgtgggatatagtctcgtggtgcgccgtttcttaagccggtctgaaaagcgcaatattcgggtgggagtgacccgattttccaggtgcgtctgtcacccctttctttgactcagaaagggaactccctgaccccttgcgcttcccaggtgaggcaatgcctcgccctgcttcggctcgcgcacggtgcacgcacccactggcctgcgcccactgtctggcactccctagtgagatgaacccggtatctcagatggaaatgcggaaatcacccgtcttctgcgtcgctcacgctgggagctgtagaccggagctgttcctattcggccatcttggctcccacctcccgaactcatccttttttatggctgcatagtattccatggtgtatatgtgccacattttctttatccagtctatcgttgatggacattttggttggttccaagtctttgctattgtaaatagtgctacagtaaacatatgtgtgcatgtgtctttacagtagaatgatttataatcctttgggtatattcccagtaatgggattgctgggtcaaatggtatttctagttctatatccttgcagaatctcctcactgtcttccacaacggttgaactaacactctcaccaacagtgtaaaagcgtgcctatttctccgcatcctcgccagcatctgttgttgccagactttttaatgatcaccatcccaactggtgtgagatggtatctcattgtggttttgatttgcatttctctaatgaccagtgatgatgagctttttttttttttttcatatgtttgttggccacatacatgtcttgttttgagaagtgtctgttcatatcctttgcccactttttgatggggttgtttttcttttttttctggtaaatttgtttaagttccttgtagattctggatattagacctttgtcagatggatagattcagatcagagctttaacagccagactttacagggaaaaggctgagtggcacctcctttatatgaagaaaatgttcttctccaacccacttgtgttcagtggatggaagaagctgttcagtaattataactgacacttgtaacacataactgattgatttaatgcccataaattttattttctttaatcgtaagatgtgaccgttaaattcttagaagacatttggctagtggattaataattaaaagaatattggatgaattcatctgcttcctattcagcagttcttttatttataaggctatttttctcaaaatgaatgatcatgaatatctaagaaaaaacaaaatatttagctgtttgaagatgaaattattatcttttgatgttgttttctttaaagtgtttacaatgataactaagtggtagggcttcttccctctgttactctaagtatgcctcgtatacatcctcaaagcattttttttttttttttttttggagacagagtcttactcggttgcctaggctggagtgcagtggcatgatctcagctcactgcaacctctgtctcccaggtttaagcaattctcccgccttagcctcccaagtaggtgggattacaggcgtccgccaccatgcacggctaatttttgtatttttagtagagacggggtttcaccaagttagccaggctgctcttgaactcctgacctcgtgatccacccacctcggcctcccaaagtgctagattacagacgtgagccaccacgcctggccacctcgaagcatttgtaaaagagcaaggtgatggggttcattaggtgtttggtatttgaaattaaatacctctgttattgatgaagccatattttaaatattatcaccactaaactcagttaaatatttccactgttaactacaaggttcaaatgcttggatattatagaagatatttgacttcaaagataaacgctacaattttgggtcataacaaatagcttttagaaggggaaaaaataagtcttgggaggaaaataagcagtctcttagtttaatatagcggttggcaaatatagatgcttaaaagttctgaaaatccccattgcaggccatcagagtgttgtaattaagtattaaattaattcagataaaaggataatccatcagggccactaatgtagtggaagtgtggtttcggtgtgattagtctcaccatggaagtcaaagaaagtcccactcagaatgaacaatgaaagaatcatatttgtctctgggtattttgtcataggctcaattgcccagtgccagtgtgtaagccactggtaaaatcctgagcccttagtcatgtctacaggtagctggctgccttagacattttatgatgacgaaattgaattccacttctgataatggtaatccatcatgtctacctctttttttctcttaaaactacactgacggccaggcgcagtggctcccgcctcatcccagcactttgggaggccaaggcaggcagatcgcctgaggtcaggagtttgagaccagcctggccaacatggagaaactctgtctctactaaaaacataaaaactatccggtcatggtagtgtgtgcctgtaatcacagtactcgggactgaggcaggagaatcgcttgaacccaggaggcagaggttcgttgttctgaatgacatagccaggggtggttatttctaaattttctgtgttgaattaagataggaatgtggatttcttcctattttgaacaacgaccaaaaaaaaaaaacgaaggctaagtgtgtttcactctgctaaaaatgtaccttttcttgaatctgtcactttttcacttacattttctgaaaatgaatataattaaccaccatggggctcagcatgctggtggccatttggaggaacttttctaccaacagtgtaacagagaaaagagaaaagggtactacagcgtacctcaacctcccctgactgttctgtgaagtacaagtgtaagatttctcactgtgatcttttgctcctctgcctttttactgccaagggctaagatgggcacagggccctttccagctgcccctgcctgagaaatgcttatttgatgaccaaaagcaataaccattccataggactaacggtgattaagtcagcttacaaatccacaagggtggaagagactgctaaagatattggaacagacatgcttaataatgcctaatttctacagctacttttgtgataatacgagaggctgaaatagataggggctgaacatgggaaggctggtgttatgaagcccaggacttggatttcagcactggtgcttactggccattgggtcttgaagagattggttcctttctcccagcctcagtctccttgtcccatcagattaataatgcctgccttgggagaggagagtcatacaggagagggcatttgagctgggctctaaagagttcaaataacgtagatgagcagagatgggcttccaagatagcaggaatagaaaacaaaagtgtcagaatgggtatgcatggtcttttgtgggaataccccaagctatttagcctgagagagaggtgtggtgtagacagctggagctgtgagttccatggctagaaatacggggtgggcccagaccacagagggccttcagcatctggcaaaggagttggaattaattcggtagaaaatgaagacccactgaaacaaagagggagccattcttgtgtgtcaggaactaagatttcaggaaccaaacgtaaaataaaaaccagcagggagaccattgtctcagtcggtttgtgctgttatcatgataccagagactgggtaatttataaacaaacaatagaaatactacaattctggaggctgagaagcccaggatcaagccgggtgcagtggctcacgcctgtaatcccagcactttgggaagccgaggcgggcggatcacgaagtcaggagatggagaccatcctggctaacacggtgaaaccccgtctctactaaaactacaaaaaattagccgggcgtggtggcgggcgcctgtagtcccagctactcgggaggctgaggcaggagaatggcgtcaacccgggaggcggagcttgcagtgagccgagattgcgccactgcactccagcctgggcgacagagcaagactccgtctcaaaaaaaaaaaaaaaaaaaaaaggcgccttgtggctgcatcctccagaggcagcaaaaactgttctcacatggcagatgcacataaaggggcctgtgctggtttcctctagcccttttagaaggcagtagtccattcgggggcacggggtggaactgtcatgacttgatttccagaagaccccatctctcactactaccacagtggagatttaagtttcaacacatgactttgggggacattcagaccatagcaagcagtgaggagactatcgtaattatccaggcgaaaagtaatcatattcctaggggcggtgagggtggtgtggaaaagcaagcaggaaatggctgagagaattcagaaatagaatgcaaaaggatttgtcggtagtgtgagtactggacacgaagaaatacagggagtcctggatggctctgaaggattcaagcctgtgactgggagggagaatggttctgccatgattagaaaacaggaaaggtggaagggaaagccagggaccttgagtacagttgtgtacctaccaagtgcatggatcaggagggagccctaagttggtatctccagcaaactgttggaaatatacaaatttgagtgggagggagaagtcaaagctggggaagtacatttcagattcacccaaaggtaggagatctttagagtttcaagagtcgatgggatttccaaaggggagaattgtagaaagagatggaaagagatacaagaagaaaatgacagggatgaagagaggagaaaaaaagagtaaaaagagttattcagagatgtcacagggaagaagataagtactgtgtatgcgaaacagtgagaacatttccaaataaaggacatggtaagtgatagtagataccacagacccaagaacagcgtagcccctggggagttcaagagctttctcgctggcaaaggttatttcctgtcaagatgaatgtgtatgcaccaataattattagtattccagaatatcctctctttagcatagtaagtgcttaacagtcacaagcaaaagatttatataaaagaaatgctcatttaatttatttaatcagacattggctaagttattagccgctacctatggctttgtaaaacatgaaaaagttggaggaaatctaatgagggtcttttatctgtaagggaaaggtcatcatgggcatcaagtattgaattttagaaacggtgccacagtgaatagggatatattataactcagattagacttcaaaaggactaatttgcttgggacttccatcatttaaaatcacttgcaataaaactgactacatgaaaagatattaatcacaagctttaatgctattccatcaaattattttaatgggtatatttgaacagaattttaatttttcagatacattttttgtcaatagaaaagagaatttgaaagatgattgtaaaatgttacaaatcaaatttaaatcctgatcttattttcattttctctagcaataaaactaaccagtgatgtgtctgaaatatatactacagcaaactcttgacacagctatgattggaaaatgagacattttggttaatcaaatattattgttaatagtgcagtgctgtctgtcggtctctaatttgtaaaaatcagagaaaaacatggtgaatctttggtgacataagagaagactcacaaatcttcatatcctggggtcagtttttaaagcagtaattacacatgatacaagattatattctaagctctctttttccagtaagaaaagataagtcaatgatgttccataaagctgattcttgtttaatcaatttttaaagtgggggggtaggcggcactgacagcattctttggaaagggaagcaacagaggagaaaggcaggatatttggtgtctgctcacattgggaaatacggggagccaggggtggttaagtccagagaaggctggatgtctgtctgcagggctacatctggaagggcaagggaacagtttccttgttgcctcagagcataggtcatgcagcacaagaggagcatttaggaaatgcagattttttttcaaggcaagacagtgaaaactattcaagaaggtagcaaactactggccctttaatgcttttcttatccttgcaagtgtgcaaggcaagacaggagattgtctgttgtctttcagcttgaatgagattgtgcctcacttactgccgccacaccaaagcctggcgtttattcctgtgcgatcattgtatactagggacgtctaactgtgtcaggaggaaatggcagctgagcccctgtggcctttcacctctagcagtgccacgctgcagcacattggccggctgccatgctcctgcctgcagtcctgccagcagctcttgtgagctgcgactttgcataagtagcttgaatgccatgtgcctcagttttcacatctgtaaaagggagatgataatggtacctatgtcatggctctaaacgcgatcatgcacgtgaaagcagttgaagtcttgcctggcagaagtaaatggtggctgctgctgctgctgctgttgtgattgttgttactcaccaaagagatggttttgtttggtttagatgagctgcttcagaaagagcaaaactattcagatgacgtcttggccaacatgattagtgaaccaaggatcagttacggaaacgatgctctcatgccatctttgaccgaaacgaaaaccaccgtggagctccttcccgtgaatggagagttcagcctggacgatctccagccgtggcattcttttggggctgactctgtgccagccaacacagaaaacgaaggtaagagtcccctgagccagcaagggcgttctgggaggtatatatacacatacataacgtgtgtgcaagagagagagttatcttttgtatgttcttgagtggtgaattttttttgatgtagtcataaatattttcattataattttactttaaaaagtaaatactaggagttactatgtcattaaaataatatatctgtgtaaattattctttatattttttatgctgcaaagcatgtaaactgccaattgttggaaaagacaacaactccattgtataggtggcaaaacaaaatggtaatgatttacataacatttgcaggtaaagggcctcttgtttcgcacatgtccaggtttgcattctagggaatattatccttcgagtgaacactcccggacgaaggggagccacagtgtattattgaagaggcagttcttcacaaggaaaatgtgtggcaataacattcttctaatttttattttccagttcctcttcttaatataaaatggtacattatataacaaaagtggatacataaagagcatgtactgtatatcatattattatgtttatgactttttcaaatgaggaaatggaggcaccaggagactaagttcttaagtgatgacttttggtaggaattttttagaaatgttttttaactgtgaggtatattgttccctctggaatggaagcacaaaattcaacttgtgtttatgacgtaatgacctagaatgccaccttccaaaaaagcagatagatagtgaaataaggaaaaattacagtttaccaacagagaggagttttgagggcctgcagagatgcagatttgacaggcaccaaagtagtcttcactggctacttattcttacatgaaatttcagattgaattaaatgttaaaggcaaagatagagaactacatataaataaaatttaattttgcttaagacttaatttgtgtttagaaaattaaatttaaggcagctgccaaaattaaggagcacattgctctaaatgttttttcctttggtacctcagagaagtaagattcttctctatcaacaaatttgagcagtagatggcatcctttttcacagggatttcttagcagaaacacctgttcaggcaagaatatctttcagcttcttttatctttttctacatgttcagaagtatacaattacacacaaacaccttgatttctagatacaaataacatgttttttaagaacacaacagcactttacctgattttctttatcaaagcagcaaatgttgatggagatttcatatttataatataccttataggccaggcatcgtgggtcacgcctgtaatcgcaggacttagggaggctgaggtgggcagatcgcaaggtcaggagatcgagaccatcctggctaacatggtgaaaccccgtctgtactaaaaatacaaaaaaaagttagccgggcgtggtggcgggcacctgtagtcccagctactcgggaggctgaggcaggagaatggcatgaacccgggaggcggacgtggccagtgagctgagatcacaccactgcactccagcctgggtgacagagcgagactttaaatttaaaaaaaataaataaataaagtaaaaaatatatataccttataacatgcaattagtactaaatctaaatataatattagaccttaagtgtactggacaagttttttctaaagaaccattgcagaaaatatatagactattttcacaatgtgaatcatcaccccaaatttgtttccttaatttgaaaaagggcaccttacagtaatagcaaacagcatgttactgacaatgtaaaaataattaaaactttaccatttatgaaaataattcttaatcacatagaagaaaacaattttagggacagttcattatcaaagacctggaaaactgtcctgttaaatgtattgagtgcagattgttttgtttctttacaggtagatagattttggtcattgaaggtcctcttcattcagtctctaatgagaatttttagtgaaaaatgtccgatctcattttgtaaattgaatgcacgctaaatttgctcttttactaacagcataccttgttgcatcagccttaggagaaaatctgcgtgcacacgtgtgaatgtacacacacacacatacactgtgaacccttggtaattgccaggatgtccatttgagcaaagcccttgattaagtacttctggatacttgacaaacacgcagctattacattgcctaggtctcatgaaaagagctgatattcttgttggatgattctgtttgaacagtagaatctggtataacaattttgggaggcaatagaacttgcagtgtcagagtcttgagttgcagtactcttcattatcagtcccaacattgacatatatatattgattatagcaaacaatttaaaaagccacttaagcaatttttttttttttttttttttttgagacggagtctcgctctgtcgcccaggctggctggagtgcagtggcgcgatctcagctcactgcaaactctgcctcccaggttcatgccattttcttgcttcagcctcccgagtagctgggactataggtacccgccaccacgcccggctaattttttgtatttttactagagatagggtttcaccgtgttagccaggatggtctcgatctcctgacctcgtgatccgcccgcctcagcctcccaaagtgctgggattacaggcatgagccacggcgcccggccccaattggtttttaaataaaatagacggccatcatctcataggatattaaatactaccccatacccctgaactcctgaatgatacagacccgagtttaaattccagccctgctatgtgcttctgagcaagttacttagcctctctggctgcttcctcgtctgtaaaataaggttgacaataattcctaactcagaggtatagtatgagcattaaataagaaggcataaaaaagctcttagcaaaattcctggaacgtagtaaatgtcagtggtagctttttttttttttaatggagccaggatcttattagagagactttatcagcctgtctcaagatgaatcaccttatggcctcaacaatgtatccttaaaataatgaatataataagccatataatgagatacagtcctaaagccgtctctcttctaacaccgtctcccacctctccccagaaacttgttagtctttctttgtacagacatgtgcacacacacacacatacacccaactactgaaaatatctaaaattctcaaaggatttccttttgttcttcatgcagtcctcattatcatagtttcaaatgcttaccaaaaatttgttgtttttcttaagaacaatcagtgaaatccagaggaggttctgatgcccattttttaaatttacattgaagaaaataagcatatcagagttttccaatgtgctgtgatttgccttaacaattttttattctttggttttcacatccacaaaacctaaatgaatggctaggctgaaatgaagctgttgttacagaattgtgctcacagatcgtgaaatgatctggctggaagcattagcgttgatgacatttgtgtttgttctactttttcctgactgcctgagaagggcagccacaaagagcagcatagcatgcagtgactgccagcaagtctttgtggccaacagtctgcctctttgtagataatacctagatataatatgtagataaaataatatttttaaagagacaaagcaggtcttataagacttgtatggatgtatttgcaaaatgtgaagctgccttctagtatatttttaactagctttatagaggcaatgaggaagccaatttaaatgttgaaatttagattaaataaatatttcattaaacttacaaaccagttcttgtcagcctcttatctatatgtaaaactggtgtactgctgattcctcattacctttggcctggtagagagtttgtacaaggcagcacggttaatagttgaggtttattacaaagaataccagaagtaacagactcaaaaatcccagaggtctgaccattctgtttctctcctcttacagcaaaggatttgattcaaagctactgagagcaagagaataactcatttctgcttacattttattttaactctattaaaagttaaagctaagataatgtatttcttgtttttaaattactaaacagccaatgtaagatgttttttagcacttcattgatgaagttactgtctggttaagtaaaggtcaattggaaaaattggaaagtatttgcagtggattgggaaataacacactactttgttttgttggtgtgtattcttttttttcggcaatgatatcataattgccttttaaaaaacttttaatgtctgctccctgagctacttattttttgagcattaatttatactaaatcagcttcaatcttttaaagcagattagggtttatgtcactgaaactagttttgtttaatcttcctaaaaaatagggttagggttttattattgtttttaaataatacatgcctatttaaaaaaatagaagaagaagaagaagagcggggagaggcagagaaacttataggacaatatcatttgtaagtttctttcacataagtatacgcatttgaaccctggaaaaaccatttactttgtgacacaactgaagttcagaaagaatgtgattagccccagatcacagagaaagtaagtggtgacattagcagtggcccgtgggactaccagctcctcagcctgcatttaaaccacaggtacacttaacttactgccccgagttgcatatacattttctaataacgtaactattgatgtatgtgctcaccaccacttcaaggtacgcgtttgccctcgtgcatgtggtctgttgtgttcttaactgcagttgaagcactattgggtccctcatcatcaggaaattctcacaaagtacaatgacctttcaactaactgcattttacaaggagtaatacagttactcattacaggttgctgcaaataggaaaaaaaatgaagtatagaaaaaccaaacctcattgtcgaaatgtatttgggagttgcagaaggaagtgaactatgtcttcctctaatgcactagtgaaatactagagaatagtcactctcgcatcagtagttactatggaatatttaatcataggatatttaatcagtgcagttctgtagtatctggtagggtctcaaacaggctttaaaggttacttatttgttcctcaccataattagaagatgcagatgttaacatttctgtttccatatggagaaacagccacagaagtggcgcatcccaaggccacagacattgtaaatgttgggcccaggcctgggattagatgcctcaccctccttttgactccaccatgctgccagtctctacatgagaaaggaccaaatttttatttcatccaaatatcctagtgctcccggaaatattttcttatattttggagacttggcttactgccactttttttctccctcactgtttctattaacatgtggcatccaaaatcgatttggactgagaatcccacctttgaatgcctggcctgtgtgcatcagtaagctggatggttttgctgaaattgttagaagccatttcatcgagcacaccgtgtctccttcagcacctgtgctcactttgtcttacctttttccctttacacttgccaccttaccaaagcagcttccccctgcacctacctccgtggcttcatttaccctatgaccattattaatcctaaaaacttcacttttgtccccattccttgtttcttcaaacgccagcgtaaaacaaggaagtattttctgagcatcagaagtgctttggaaaggtcagatgatggtgaggaatatcatgctgtccacactgctttctttgggtcggacccagaacacataaaaagggaaaattgtgaacaatggcaaatataaaatgaaatatcctcatttcacacgtttcagctgtatgtcatctgtcaaatggaagccagcctttttgaaaaagtgagaaaaagactgcggtttccctcttctgccctcatactaaggacaaatttgattcactcactaaatggcagattatatagtaaaactttgctctcctgataaattcatatttgcacttcccctggaaatttaacagagtccttttgtagttaattaactgtaaaataagataagattgggcagttgtaaaaggaagtatctttaaggttttctgctaggctgggaatattttatttctaatcaaaagccaagaaactatctctaaactagctcagagggaaatccaccctccccacccctcttctttgatgttgctgcgtatcctggtgagggcttttattagaaaactaaggagcaggactggcacatcaatagcgataagccatttaaagtggtgcccctcctggtcctcgatgctcgggattaactcactgtggttcttttctggctgctccttttttgtaacttgtttattgcatatgcttttttccctgctcgactatgtttgggagccacgacttaccatcttgatttgtcttgtttgctttctgtgtcccttgcttcctgtgcccagttgagcctgttgatgcccgccctgctgccgaccgaggactgaccactcgaccaggtatcagaaccgcttgacttgtgcctctccgcatcttgggcctaagctcgagcagacgttgtctcctttctgcattttaagcctctctcaattgtacttactgcagagtagaatttgaagtgaccttagaaaccaaacttttaaaaattccccttgactattccttactcttcatttcccaagttccgagtgaaatgattttttttgtttctgagctttccctttgaaacctaaaagagagcccttccaaatttgggtttttttttttcttttttctttaaaacaaacaaaacaaaacaaaaacagagacgattatatacagcctgtccttaaaaacagaagcccagatagatgtagactctcaggtgatgacttggataccagtgtgaacatctctcctttcttgtttggtgtccagatgggtaattttctaactgaactgggctcaaacttcaatcagttactgaagtagacatgatttcctgaaaataccagaattggtttctttccagagcccaaaatacatcttctgttttgtgggttgtatgtacttattctcaatgagtggctaaagtaacacaacagatgtggatgcataattttgcacataagccctttttttatgtattacttaaaaatcccattaacactgaaatagacacttctttttttacagtttcacaaacattaagaagaaacacatttttattttatgaataatgtcatagcacagcagaagcatatatgtgcctggtgtctactctatgaacaacctcacccaactgatagtagccagtgctttcagtgaatcaaaaagaggaagaaagttattgaattgacaaatttgtgtattccagggagattttaatcccaaataacacatacttttccatatttattttcttctttatcctcataatgtccccaggcgatagtcaaagaacagggaattaactttctttgaagatattaatacacagaggtcaacctttgctgcctggttcagatacagtcagcagcagaccaggagacccaccctgtccctcacacttccaccacaggctcgagccatgactgcctccaagcacggtcactgatgaagactgagagtctgcctgtggcatcttcatgcctttatgctgtgattaacagtggcagcagagacagtagtgtgacacgtcttgacagctggtctcgttgatttatgaatttctgtctgtaggcttttaaggggaacttaaattatagtgagtcagagacagtttcagttcttctaatgtcctccttattgtcaatgtcatgtaagggaatctcaaggagccaggagttgacattcctgttctgctcagccaacttgtaaggcctcgggctgagggtcagttcagttctaattgcaaccacagccagctcaggttggtcatttgccttgggacttttttcatggtgcttctctttaaaagacatgctcttcatctacaagcataaaatgtaacttagaaagcgctcattcgactcattcaattttatcaaatttctacattgggccaggagagcctatatgttactattgaaacatccaggaacaggtgacactaccagtcaatgtttttttcttttttaaaaaaattgttttttgattttttttttttttttttgagatggagtctcgctgtgtcccccaggctggagtggagtggcacgatctcaactcactgcaacctctgcctcgggggttcaagcaattcttgtgccccagcctctcaagtagctgggactacagatgcgccccaccatgcccagctaatttttttgtattttcagtagagacgggatttcaccatgttggccaggctggtctcgaactactgacctcaggtgatccacccacctcggcatcccaaagtgctgggattacaggcataagcaccatgcccggcctattcttttaaaaaaaattttttttaatctaaatctaacaaaaaggacacctccaaacgctgtcaaacaaaaacagtgtgttttaaaggaagagctagagaatagttaatggtattacactggtgggagaaaaccatccaaaacctttctcataacagtaagaatatgatgtcacttggggatttcacaaagatcaatccactaaattctttctaggtttgaaagaaattaaacggtagggtccctgctctcaggagcttgaggtataatagaaggaattttgcatatttggaaacatgagatggaatttggaagacaaggaaatacaaagcaacattaagtgctaacaagaatgttctgtgatgggaggagatggagtactaacccaggggcatgttaagtagagaacttactggagatgggcttccagagaggttatgaaagatttgaggcacctggattggcaaagaagaagggaacaattctattcagaagagagggtggcctaagccaagcttcctttcatacacagcgtaggcttgggttgcccagtaagatggctaaagttgagaaagaatgctcagatatgaagtgaggaagattctagttaaggtttgtctatgaatagcagtatttactgcacatgtattaagccatgcgtgtgttctgtttttgtgcttgtagtaagtttatcaaacatttgggctaatttccccgtgttttgtagcatagctttggttcttcttcacattttagagaccacccacttgagtctaatgtgccgaattatatctttagcctttccaaacttagaaagccttcccaagattgtcatgccgttcaagtgatggcattgtttttgaataatcactgttgtcctcagaaacaagttaaaaaaaggtttttgtttttcccccacccagtgctttataatcatgactgaggaaaatggcttctccttaactctcatatctaaaaaaacagaatatggtagcttccagcatgcagtgtcaagtagggaccattgtaataacagtggtgatttgggggcatagtggccattatagctcctcctcctggcttacttccaaagaaaaaatagactctgaaggactaattatacagtttgaccagaataaaaaagaaaaacacattagcgagctcttcacatagggtagaaagctaccctttctgttacaattcatcaccacccttctgcagtccaaataaagggaaaccaggtccttgacccgagccatgcaagaggtgtcatgaaggacatacctcccttagcccccacatgaacaaaaggctctgtccactcatcatgacttacaggaagagagagctggagtcaccagggcttagggtgaaatcagcacaactcaagaaagacctctaagtaagcctgcaaaccaaggtccctgccatttatttgaaactactcatcacattttattacatgcattatcaccttattatgaatatttccctatgtgccagcttactgattttgtcttttagtaagatttgcttaatgtaaaaagtcttccctagatgactattcatgctaaacaaacatgaactattatagcaagagctcttctgccaagagcttctcaaactattgagctgtaaacatgaatttatctgtcatgctgacttgataatatgaatttttttttttggaccaccaaaagtattcacagtatcatttcaaaagtagtgtgggcttgtaaagtttttagtggagagctcttggttttgttttttttttttttttttttttaaaacaggatttgtctctgtttccaggctggagaacagtggcatgataccagctcactgcaacccccatttcctgggctaaagctatcctcccacctaagtttcccatgcagctgggattacagggatgtgccaccacacctggctcatttttgtatttttagtagagacagagttttgccatattggctaggctggtctcgaactcctgagttcaaactgtttgcccgcctcagcctcccaaaggctgggattacaggcatgagtcactgcacctggccgagagctcattctttttttttttttttttgagatggagtctcactctgtcgcccaggctggagtgcagtggcacgaatctcggctcactgcaagctctgcctcctgggttcacaccattctcctgcctaagcctctagtagctgggactacaggtgcctgccaccacgtccggctaattttttgtatttttagtagagacggggtttcaccatggtcttgatctcttgacctcgtgatcctcccgcctcggcctcccaaagtgctgggattacaggtgtgagccactgtgcccggccagagctcattctttacttttatttttcagtataaatatttggctccaaaatctaaaagggaagactcttcaaactgttcaagaaagttttcttaaaaatctcagaaatatagttctaacctattgtgttgctagatcttttatttatttatttatttttggagacagagtctcattctgtcacccaggctggagtgcagtggcacaatctcagctcactgcaacctccacctgccgggttcaagcgattcttatgcctcagccttctggagtagctgggattacaggcacccgccaccacacctggctaatttttttttttttttttttttttttttttttgtatttttagtagagacagggtttcaccatgttgaccaggctggtctcaaactcctgacctcaagtgatccacccagcttggcctcccaaagtgctgggattacaggcgtgagccaccgtgcttggcacgttgccagatcttaataacagaaaaggagtgagctctaaagaaatcactggttatataaggatctcagatttaaaagggctatagaaagattaaaatatacagccagtgagaattaagagagttttagcatcactaccctataaaaataagtgtcagaaaggttcgtttcagcagaatgagttgaaacttaaccaaaaaatacttaacaatattaaagtaagaaaataaataagaatagagaactctgtgggtctcgtagcaagaagttgggggttgagggttaggtcattgagaggaccagagttaaagaatgagaaagggaaactgtcccacttccattgtgccttttatgtctatattaaagagaatgaacttctgatgaaaggaaattaaagcccgagatagatcaacatgagaaaagaaagccctagcccattagttacctattgctacgtagcaaataacgcgagaatttagcagcttaaaacaacaagcattagtttcttacagtttttataggtcaggatttgggatgtggtttagctggatggttctggcacagtgtccgtcatgtggttgcagttaagacactgcctgagctaaagtcatctgaaggtttgattggacctggtgggtctgtttccaacgtggctcactcacgtcactgttactaagagacctcagtatcttaccatgtgaactctgtaatgctgcttgagcgtccctacaacatggcatctcgcacccctgcaccaagaggtccaggaaagagattaaggaagttttagtgccttttttggcccagtctcagaagtcatacaccatcacttctatcatgctctgttcactagagcaagtcactacatcccgaccacattcgaaggaagggaatcaagttctccctcttgaaggaaggagtatcagcaaatttgtggatatattttaaactatgacatcttgctacccaagtccaagttcttatgacccagaccaactgcaggctaagagaacttgaaggggaagtagcaccattgcctgtggtctttgtggaaagctgggaaggtagggataggaaaatgaagttctgaatagcaaaaaggagagaagatagcttcacaatctgtaagccaggtatagagtgacattgattgtgggtctcttttcaaataggttatcaagtggaagctttttgaacaattggatgaggaaatggtgctaggtcacaaccagcgtggatttcctaggttttgtcagattatccttaccttctccttgtataggctgtgctcttagactggcacatcatatgctgtggacattgtgcttttcagtgtcagcaagatgtgtcacaagtttcccagaatctcgtagacaagattgaaagagtgattaggccaagagcaggaagtgaattcccctgggagccaaaggaattgggaatgtgtagcccaagtaagacaagaaccagcaggaacatgcctctccttagggtcgtgatacctgttcaaggttttaatgtggaagggaggattaggcttgctctgtgttgaatcaggctcaaaggatggaagttacagggaagctgattctggcttcatgtaaaaaaaggacagtttgggcaggcaaatctatcaaaaaatggagggaaattgatacattcctctatgttcaaacaggaactgacaatctgcccctgggtgggaacacggtagagaagatgacttcaaaagcccttttcatcctaaaattctgatgtttgataattaaatgttatagcatggacactgacatttacattttttacttatgtttttggtttttaaatgactctgcattttgttttaagcttcaaattattatttgaataatgaaattcatcagaacaattagtgttaagaatcatatagcaatttatagaaaaggaagagttcgtaggttataaattctgttagttgctaagaagcatttttaaaattatgtactatagctctttattcagcagacgaaccaattacaatctgtgtaactagaacacttgactaaaattatataatttttacaacgcttcactgcatagatacatgaacataatttatttgtaattggaacaaagccccaaagtagcagttttgttctaccaggtaattaatgctcatttttaaagccttttattattatttctgaagtaatgagtgcacatggaaaaagacacataataggctaaacaataagcccgtaagccaagccaacatattccaggaacaaatccttgccaacctctcaaccaggatttaacttctgcttttcccccattttcaaaaattatagcatgtatttaaaggcagcagaagccttactttcaggtttcccttaccctttcatttctttttgttcaaaataggtagtaattgaagttttaaatatagggtatcatttttctttaagagtcatttatcaattttcttctaacttcaggcctagaaagaagttttgggtaggctttgtcttacagtgttattatttatgagtaaaactaattggttgtcctgcatactttaattatgatgtaatacaggttctgggttgacaaatatcaagacggaggagatctctgaagtgaagatggatgcagaattccgacatgactcaggatatgaagttcatcatcaaaaattggtacgtaaaataatttacctctttccactactgtttgtcttgccaaatgacctattaactctggttcatcctgtgctagaaatcaaattaaggaaaagataaaaatacaatgcttgcctataggattaccatgaaaacatgaagaaaataaataggctaggctgagcgcagtggctcaagcctgtaatcccagcactttgggaggccaaggcgggtggatcacgaggtcagaaattcgagaccagcctggccaatatggtgaaaccccatctctactaaaaatacaaaaaagattagctgggtgtggtggcaaacacctgtagtcccagctgctggggaggctgacgcaggagacttgcttgaacccaggaggtggaggttgcagtgagctgagatcgtgcctaggcgacagagcgagactccatcccaaaaaaaaaaaagaaaagaaagaggctgtatgtatagttctttcagactacaaggcagcaaagttcgtgcatgactcgggacttaaagtggaattaatttcaatatagcagccactttgacttccactgtgttttctgggaaaataggtttacaataggtttatttgaaggatcaaacacatgcatacactgcttggttttacagaacactttatgtggcttaaattcacatccggaactgtcttcctttacccattcatttctcccccagctctttcttttcattccctcccctacctcccatgatttaacttctcttgcaagagtaagatcatggagtgagcaggaccccatgatgttcccgatagtgttattcatcaaaaggtttgtgcaaagaagacagcagcttccttttcagatgaaatcacttttcccccctaatgttagaattggagtaaatcaaaaagccacatctcctttgtggtcagctctagtagttatataaaatcctttaccaaaagcttagaaatggagataaatcaaatcgtggattatgttagggttccatcttatcagtaggtgcagtaagagggttaaattaatgaagacgacaattttatcacattcagtggtggacagaaaaatggtaagaaaatttccatagcaataatacttaaagttatctcaggcacttcttttgttttgttttgtgtgtgtgtgtgtgtgagtgttacttttttccaagcagaaaatgtcttttcaatattcataaagttgataaatcctagtattaatctctaaaagaaacacctccaaattattatttatgccttacttgactccaaataattgtagcaaataaaaaactgacttgggatttggatttgcattcttaactcccatagttctttttttgtagaaagacatttagctttttgaagcatggttttcattggcaagataatctagtatcagttgttataagatcagggtttctcttgatgaggctgttgctgaagaggttaataaaaactggggaaccactaaagagttgaagagttggtggggtagaaagctgacgattaatgtacagatttgcatttgtcggggcctggggcctgtgtcatataagcccatccccacaattacactaacgcctataatgcgacagtgactaatggcagcggcagcaattaggagaatcagctccctctactggactagttaagataatgtattataattagtgcaatgaatattacaaaattacagtattttcttaaaggcacaggcatatgtccagacttgtatttattcctgattacctcacactagtatattagctaattaatgatttgcttttcataaaaatgttgagctagcatatttgtttagtaaagggaataattatgaacaatttctcattttgttataaaccacgagtaaaacacttttagaagttgcttcatttgctatattttatattgcctttccagattgctagtatgttagtttcagcttagaaaaatcagtcatttgactaccttgaggctaaattgaaagaattttttagggaggtacaggcataccttggaaatttcagaacaccacaataaaacaaattttgcaacaaaatgtcacacaaattttttggcttcccagtacatataaaagttatgttggccaggcacggtggctcatgcctgtaatcccagcactttgggaggccaaggcaggtggatcacaaggtcaggaggtcgagagcatcctggccaacatggtgaaatgccatctctactaaaaatacaaaaattagctgcatatggtggcatgtgcctgtagtcccagctactcgggaggctgaggcaagagaatctcttgatcccaggaggcagaggttgcagtgagccgagatcgcactccagcctgggcaacaagagcaagactctgtctcaaaaaaaaaaaaaagtttgtatttacactatactctagtctgttacatgtgcaatagcattatgtctaaaaaaaaaaaaagccatgtatatactttacttttattagtaaaatattttattactaaaaatgctaatgatcatctgagtcttcagcaagtcctaatctttttgctcgtggagaatcttgccttgatgttcactgctgcaggctaatccaggtggtggctgctgaggtttgtggtggctgtggcaatttcctaaaataagacaataatgaagtttgctgcatcgattgactcttcctttcacaaaaagatgtctctgtagcatgtgatgctgtttgatagcattttgctcacagtagaacagctttcaaaattggagtcagtcttcgcaaatctagccactgcttcatcgagtttatgtgatatcctaaatcctttgttgtcatttcaacagtgttcatagcatcttcaccaagagtagattccattgcaagaaaccactttctttgctcatccataagaggtaactcctcatccattcaagtttgatcatgagatggtagcagttcagtcatgtctttaggctccacttctaattctagttctcttgttatttccaccacatctgctgtgacatcctttactgaagtcttgaactcctcaaagtcacccatgagagttggaatcattgtcttccaaactcccgttattgctgatgttttgatctcccatggatcacagatgttcttaatggcatctggaatggtgaatcctttttagaaggtttgcagtttactttgcccagatccattagaggaatcgctatctatggcagtgaatagccctacaaaatatatttgaaatatattttgaaataataagaggctgaaataataagacttgaaagttgatccacaggctgcagaatggatgttgtgttagcaggcatgaaaacaacagtaatctccctgtacctgtccttcagagctcttgggtgactaggtgctttgttagtgagcagtaatattttgaaatgagtcttttctgagcagtaggtctcaacagtgggtttaaaatattcagtaaaccatgctgttaagagatgtgctgtcatcccagttttgttccatttatagagcatgggcacagtagatttagaataattcttaagcgccctaggacttttacaatggtcagtcttggcttcaaaaacaaagtcgccagctgcattagcccctaacaagagagtcagcttgttctttgaagctttgaaggcaggacttctctctagtgatgaaagtcctagatggcattttcttccaaataagtctgtttcatctccactgaaaatctgttatttagtgtagccaccttcatcaggagtcttatctagatcttctggataacttattgcagcttctacatcagcacttgctgcttcaccttgcacttctgtgttatggagatggcttcttcccttaaacctcatgaaatcaacctctcccaacttttttttcttctgcagcttcttcacctctctcatccttcatagaattgaagacagttgtgggccttgttcttgattaggctttggcctaagagaatgttgtggttggtttgatcttccatccagacaactaaaagttttctccgtatcagcaataaggctgttttgctttatcatttgtgtgctcactggagtagcacttttaatctccttcaagagcttttctttgcattcacaacttggctaactggcacaagaatcttggctttcaatatgccttgcccactaagcttaattatttctagcttttgctttaaagtgagagacctgtgactcttcctttcacttgaatacttaagaggccactgtagggttatttactggcccactttcaatattgttgtctctcaagggatagggagcctgggagttgagggggtggagtggccagtttggggggcagacagaacacacacaacatttattgatttagtttgctgtctttatgggcatgtttcatgacactccaaaacaattaaaatagtaacatcaaaggccactgatcacagatcaccaaacagatataataatttttaatgtttgaatatttaaataattaccaaaatgtgacacagacatgaagtgaacctgtgttcactgttggaaaaatggcaccaatagacttgttcgatgcagggttaccagaaacctttttgttttttttttttaaatactatctgtaagcactactgtacaataaagctatgtatgcctgtattttcattaagttgcagagcaaacgtggtaatatttagctttagttttacttcatctggcataagatcaactccttatataacaagatgataaaagttgtggtgtgcttctataatttcattcaagtagataaagttgaaaaataatgacttgcttttataaacagtatgaagcaatgtagtgcagtaaatgaaattttattccttctttacaatgttctcaaaattatttttatgtttaatccaaataaagagcaagaataaagcaacatttcagattttggtttctggagacaatagttagaaagcatgagttatgagtgacttaaaattcttgttgcctgtacttcactttgaaataacattatgctttaaaaagcattacactgctaaaggttaattagaattctgcagaattactatagctaaaagtaggtaacaagatatctttttttctattgtttaactcctttgtttcagaatgcctattcctgtgcattaaaagtgtccctccaaggaaattaggacatctgcagagttgaaaaacacctaagtctcagtcacttagagtcacacatcagggctcagagtgctatgactaggaaaatgctgacctcctttcattagtatgatcgtgcctttccagcttttgatagatccaagcgctatcttcccaccactcaccaaatgttccacctgtcaaagggtttcaggtccctgcagacttcggttttgacctgtggggaaagtagacttcctcgaactggggaagccacatgttgtacatccttctataaactatgattatcattcttagtaggaaaatatgtgatttctttttttttttttttttttaaagtaagcatcaaatatttgaccaaccagttgggcagagaatatactgaaactttttatataacctcatccaaatgtcccctgcatttaagaaatgaaattcttctaattgcgtttataaattgtaaattatattgcatttagaaattaaaattctttttcttaatttgttttcaaggtgttctttgcagaagatgtgggttcaaacaaaggtgcaatcattggactcatggtgggcggtgttgtcatagcgacagtgatcgtcatcaccttggtgatgctgaagaagaaacagtacacatccattcatcatggtgtggtggaggtaggtaaacttgactgcatgtttccaagtgggaattaagactatgagagaattaggcttagctttttgctaagaactagctaagtatctcttttaaaaaacgaatcagtgtgcttccatgatgcttgggttacagttgttctttcttgttttggttttcattcattgcaacttaccgtgaatattctgctcaaggtattgagagtgtgtgttgttatctcaacttacaatttgtgttgaagttatcaaaataatacaaatgataatgcatgactttaaaaaagcatgattactcttagacttttttttttcaaacacaagcaacaaaaaccagtacaagaagttaaaaataaaaatagaagtaggaagttgctttttccaaaaaaactaaacatgtttattcttggatttcttttgtcttaaatagtctggcctctcaatacaaccaggtaatagtaaataatgtgacttttcagtgcagactcttacctttaaagtttctcaggaaatcacactataccaaatggcccaccaaaacatacatgattgttatttgagagttctgcaacctattaccctgcacttccacctgaaatatcttagtttcaaggtgctatactaaaacaagaaagagagaaagaaaatttacgaataagttatttttatgcatttgaaatgccatttggatgggggaaaaagtgttaaaatctcacagtatatgcaactttttaggaaactgtcttgcagagagtatagtgtaaacataacttttatatgcacagggaaactgaaaaatttgtgtgacatttaattgcgatattttaagagttatggaatttttagagctgaaagatttattgatgatgaccaatcaaattgatcttctcatcttgtagatgagggaactgaggccgagacagaagggttcaaattatgcaaggtcaagctcagagtccagatttcccctcatattccccattgctttttttttttttttttgagacagtctcgcgctgttgcccaggctggatcttggctcactgcaacctctgcctcctgggttcaagcaattctcttgtctcagcttcctgagtagctgggactatgggcacacgccaccatgcccggctaatttttgtttttagtagagacagggtttcaccatattggtcaggctggtctcgaactcctgacctcaggtgatccacccgccttggcttcccaaagtgctgggattacaggcgtgagccaccgcgtctggcccccattgctttttccatcagagaaaagtccaggtgtttctagggagttgaagattccactatccccaaggaaatgggctctaaaccattcttgattagaagaggacaggcagagtttaaataaatgaaatttgtggtgaagccagaaatttcattttgctcagcaattaaaacctctgcagactacaacagaagctgctgatggaaattggggtggagcctcatttccccattcatactgacgtggatgagcagtgtgaggaaggaaaccaagagaacagcaggcagcagggtggaaaggaacggactgacccatagatcagagtgtgagcacataaaagcaatgaccccactgtcatgtttggccattgcaccttttgtgatagtatctaagcttatgtccctcaaaacagtgtaagataggttttcattagtatcagcttatttcatttctgctcaaattaatttttaaaaaaatttaattccatatttgagcaaataaagatgtcttcatacttgagtaattcaagaccccttttttgctgctgttgttgttttggtttttttcatggttttgttgttttcttttgttgttgttgtttctttgttttttgagatggagtcttgctctttcacccaggctggagtgcagtggcatgatctccgctcactgcaacctccacctcccaggttcaagcgattctcctacctcactctcagcctcctgagtaactgggattacaggggcataccaccacgcctggctaatttttgtatttttagtagagacagggttttgccatgttggccaggctggtcttgaattcctggcctcaagtgatccgccctccccaacctcccaaggtgctgggattacaggcatgagccaccatgcctggccttcaagagcactttttagtttatttaatataattctctttgttgccggtctgtccgttgaagttgccttctttgatgccagaggccaaagacttggcttcctcgggcttccataacaaagtaacacagatgggtggattaagcaacagaaatttaccctctcacatttctggagtgtaagatcaaggtatcagccaggttggttcctccccaggcatctctccttggtttgcagatgcctgtctgctccctgtatcttcacatgaccttcactctgtttttctgctgtgtcctaacctcttcctacaaggacaccagtcatagtggattaggatcaaccctgatgaccttgtttaactttaataacctcttcgaccctatctgcaaatacagtcacaggtggaggtactggcagcttaggacttcaacatatgaattctagggggacacgttttagcccgtaacagaccccagtgatgctgagcataaaagcaaggcctccacctggagctccttcccctggctgtgcgtgagaccaggtcctacctcagacctaaggaaaaagaatccccaaataggaggctgcgaatctgagtgttgaaaatttccccaaatgaatgagatgtgcagtcggatttgagaatccctgacacatcattttaacactccttccttttagttctccgcgcaagcctcagggagtggaaaatggtatctctcacctcccagataaccggttgccttttaagtgctcttccagctgcctgaattaaaacgctctttttttagtcagtttaccaagcagtgtctcattggacttaaaatgtcagaggagaagttgacactttgacccagattctgacattaatttttaagccaggaggtatccttgcaggagcaaaatcgggaaggatggctgttcagctcttctctcctcattttgctgtctactggagagcaactggaagcctttctagatgaggggctccacctcattcgtgtttgttttgtttatttcctctcagctccttcccctcaagacctttgtgactgtccttcctgaaagcagccctctgtgcagccccatagtgtgtctgtacagcaatgttgaaatagaccacattccgcttttctgtcctcaaaaaagatgtagtttagctgggatggtagaacctgaacacagggagttgcaacccagcctaggcatgttcccaggtgagagagcacggtgggctttcagagcaccatttttcttagcattccagcgtctgcacccacagaagtgatgcttctgcaacatcctcttcctaccttaacaggcactctcaccctcaagtacatggaaatacctttatttccggctctggctaaccttcattaatcagtaaccctacttcagtaagaacaaaaatgagtacatcaatatttccagttggactcacctcagtcactcaggacagaataccattgtacttacataccatcgtgcctgaagaagtcatgatgaaagctttggtttccaggagattttttgtttttagagtgaaaaatgcccgcagaagatcacagagataggaaccctaggaaaaaaactcctgagaacaaatgtataaatgaaacaagcctagaacagtcacataccacttcacactggagagaacgttctgagaaatgtggcatggggcggtttgatcgctgtgcaaacatcataaagtacatgtacataaatctagatggtatagcctgctacacacctgggctacacacctacaactattgctcctaggctccacacctgtgcagcatattgctgcactgaatactatagacagttgtaacacactggcagggatttgcgtatctaaacaaactagaaaaggtacagtaaaaaatacggtattatggggccaccatcatatgtttggtctgtcgtggactaaaatgtcattatgtggcccataactgtatttttattggtagagttgttagcatttggaaatgagcacttgctagttgttgtttttttttttttttttttttttcaaataagcaggaaatattgacttactgaatttacttagccataaggccagagagtcactctgtgagccattggccacgctttcccaaggaggtaactgtgccttattggtgcttcaagcagtgaagcaatagccctttattattaccactccccaaatgtgccctccatgtcagaatagccctctggtggctggaaatctcagcactagctgaattaaccaccttgctcctgttttaggacgttcctgcaaagcccactaatcccaggatctgtttagtagcaagcggtacttttctacattcacatacatagacactggatatttaaaaatacgtattgtagctctttctgctactctccccagacatgtcacctttaataaggagaagttgggggcacagcttctctttattataggatgtgaaaaagttttcctctcacagatctgatcacttgaacaccagaagtctccccgcccccacctcctggttatctcattaatgatctaaataagaagagagttccttttatttggcttttatggaggtatggcatatgactttttctaagtaatatgctgtcacactggtgactgtataaaaagatgtccttagaggtcctttcttcccggccagaagctgacccaccaggatacagacgcactgacgttggcattgtagagtagttggagagagtggtcaggttgaatggaaagccacgataaggaaaagtgagggggggtgcagaacctaggagtggcttacagtgagcagcaggaagagaaattggaagatcaaaggaaagcatcaaaaatgatcacaggccaggcgtggtggctcacacctgtaatcccagcatttggggaggccaaggcaggtggatcacttgaggctaggagttcgagtccagcctggccaacatggtgagaccctgtctctaataaaaatacaaaaaattagccaggcgtggtggcatgcgcctgtagtcgcagctactcaggaggctgaggcaggagaatcgcttgaacccaggagatggaggctgcagtgagccaaaatcacgccactgcactccagcctgggtgacagagcaagactgtcttaaaaaaaaaaaaaattatgaagggatagcaaaggagttcctgaacctgcctgaagaattgcttgatgttggccataaacatagtcaactgccttctagttatatataactatagagagatggcatcaaaattaggaaaacaagcatctatacaactaggtagcaggcagttactgggaggttacgagggataagtcactagcttgaaaacttcctattttctttgcttttattttttttttccgcagacttgtggctcctttgatgtgtcacactattgttgtattgttcgccttagttcccttaccctcctttactcgtctggtccatctcaatgacaggattctgtcgtttggcctgactcagtcccttgtataaaaggacatctattaatccacatcctgctggttactgtacataataaaatgtaaacgtggtgtttcctgcctctcctccaagctcacacacccgcatgtaaatactctaggggcaataggaggagacctagaaactaaggtcacccaaatagaatcttgtccctgcaggcggatagctgagctctaaattactctggatacagtgaaggactaaatggttccaatgaatcaagttcagggagaaaagggtcagggggtatggaggttagccaaagagtgtcaaacgttctcctcaaagctattttagaacaaggctggtcaggctatttgggctcagctcttttcagcgtgtgtcataggcagcagccagttgaagccatgccaccatgcagtgcaggggtccaggtctcaggaaggtgcagcgtaccgagagtcacatgaagacctcagatcatttcctgctgctgtgtaatccaggcagtctgggaagagaatgaatattcagtggttgtatgtatgtgtgtcttcatcccagcaagtgacagatgttcctgcccagttggaaaatggaaattctgacttcattgtcttatcattccttccagaacaagcaccatgggctcaaaccctccctggctctgctttaagggaaataatattgtgtctgtgcagaggccctgtctgcacagggtcgtggtagggctggccttcacatggtggcccatgccactgctgtagcttagccatgaggaagagattggtgagcctgctggagaggaaggctacccttacttggtgctcctcctttatccatagacatgagtactcagattttcgcatctagctttcaaggggctggagattaaagatccaatccatactccttggatgcccttttgtcaagataatcccttcttctgtagctcctaagccctctaaggtctgagggccaagctgccccatggcaggaatggcaaaatgtagctgtcctctcagtggcaaaaggtaataggattatcaagtagcaaaacagaagccaagaaaagacaggagagttagaggtctggattgtgcaccagccttggagcctcgcatctctagcagggcactcttaagcgttaggctttggagtttgaagaggagataaacctatcaaattgccaggtgttcccctgcccttgatgcatgcaaatgattgttgacagccagtgtgatggtagatgtgcctcctggaagaaataaaagtataatattccaacaatcaagcagcattgtggcttttttctacaatcagaaacatagcagctttgtgcttgatctcctaagcaagataattttttttaacctgggcattctttgagttctcagtttcgaggtgatggggagcaaaaatgatgcccaagttcaaatggcgtactgctgcagataggctgtctcctggcacacagatttacagagtgaatgaaatctctcattattggtgctaatctttaaccatggtttttaacttacaagttggaggctaattacacagttaccagttaaagccaggtgacctcatttgttgacaacagtgcacagcaaaggaaagaggagaggataaggaaaatatctgtgatttgctcccagaaggacagtgaagctgagcatccatttgagcagagtcctctgagtactggccttggtcagagcttgttggtgggagtgtgctaaggggagatgcctaggtctgtcattggagtaagctgagggtttggatgcaggggaactcaggcagctctgagccacagggtggtagatgggagggattcacagtggcgcacagtctcttccataaatggaaacgtaagaatcggggcacatggccatggcggctcatgcctgtagtcctagtgctactttaggaggccgaggtaggcggatcacctgaggtcagtttgagaccagcatggccaacatggtgaaaccccatctctactaaaaatacaaaaattagccaggcgtagtggcgggtgcctgtaatcccagctactcgggaggctgaggcaggagaatcacttgaacctgggaggcagaggttgcagtgagccgagattgcctgggcaacaagagcaagactccaactcaaaaaaaatgggcacataatggatggaacattctgtcccaagggatgagggagctgtatatctacctattccagctgccttgggattagccactggtagtcattccacctcactcccagactgaaaagagtcaatcacttcatgaagtggggctatccgaagggaccacaggggacctgattatactgacagatttatttttatttatttactttttttgagacagagtctccctctgttgcccaggccggagtgcagtggcacgatcttggctcactgcagcctcagcctcctgggttcaagcagttcttctgcctcagcctctggagtagctgggactacaggcacgtgctactgtgcctggctaaatttttttgtatttttgttaaagatggggtttcactatgttggccaggcgtgtctcaaactcccgacctcgtgatccacccgccttggcctcccaaaagggctgggattttgagccacctcacctggccttttttttcttggagatggagtctcactctgtctcccaggctggagtgcagtggcacaatcttggctcactgcaaactccaccccccaagttcaagccattctcctgcctccgcctgtggagcagctgggattacaggcgtgcaccaccacgcctggctaatttttgtatttttagtagagacaaggtttcaccatgttggccaggctggtctcaaactcctgacctcaagtgacgcacccacctcaggctcccaaagtgctgggattacaggagtgagccactgcacccggccatattgacagatcttttagtctgaattgttatcagccagtgtggtctagtcatgacatatctagctccatctcgagacctcatgtcttactgctgacactacatcctcgctggtactttttcttccttggcttcaggggcattgctgtgtaggctcagatccatgccagatggggtgtgtagggggaaaagctgcataagggaggaatgtcacttggcaacactcaacaagggggaatgggcctgcagtattctcccagagatgaatgagcagcccattctaggaaatatccctttgaaggaatatcttctctatggtacatccaaacttttctctggaaaacatgcctcttcattctgatgactttctatttattctcttcatcttaccatggttttacaaaagaggaattttaacatactcattcagcagagttaaggacctcctctcttctgcgaacggggagaggtataacaaatatagtaaaacaagaacagccactgcccacgttgtaggggtaagtaccctgcccaacctgcagacagtaaatgccacacacagctctaacagtgacagggggagaaaaacgtcttcagttactggcctgaccttagaggtaaagcaacatattaacagagagggtctgattttaaactttgagctgaacatacttctatagtatcttaattctcagtttttaaaaaattacatcatctagaatggcgtcgtccttgctcttccttttttcttgtgccaaataatagccccctttggtatatgttattgttttaattgattctcaaacctctccttaacattttaacaaacataaaatttgatagaaatgggctagactaaattcagcagtccaggaaatcgagtatttttctacacagatttgagtgtcacccaagatacagtatactttgctgaatctccctccatgatactcttgtggttttatctattttaccaaaacacttccacgtaaaacaggcttccgttgactctgtttgtcctttatggacccaacaggggaggaaaaaataccattgcactgggtttatccacttactgtggagttggggaaccagaaacaaccactggacacgttgcaagcgcgtcaaggtttccaccgccacctggtggctagatggagcacagcatctgtgtaactggtgggcaaaggcgttctgctccaagatgtcaaagtgggggagaaaattatgggtgttctgcaatcttggcaaaagaagagtactgtactccttatctttttactgcttctccatgttcacccttaaaagattgatttttattttttactcagctctcctcttgtttttcaggttgacgccgctgtcaccccagaggagcgccacctgtccaagatgcagcagaacggctacgaaaatccaacctacaagttctttgagcagatgcagaactagacccccgccacagcagcctctgaagttggacagcaaaaccattgcttcactacccatcggtgtccatttatagaataatgtgggaagaaacaaacccgttttatgatttactcattatcgccttttgacagctgtgctgtaacacaagtagatgcctgaacttgaattaatccacacatcagtaatgtattctatctctctttacattttggtctctatactacattattaatgggttttgtgtactgtaaagaatttagctgtatcaaactagtgcatgaatagattctctcctgattatttatcacatagccccttagccagttgtatattattcttgtggtttgtgacccaattaagtcctactttacatatgctttaagaatcgatgggggatgcttcatgtgaacgtgggagttcagctgcttctcttgcctaagtattcctttcctgatcactatgcattttaaagttaaacatttttaagtatttcagatgctttagagagattttttttccatgactgcattttactgtacagattgctgcttctgctatatttgtgatataggaattaagaggatacacacgtttgtttcttcgtgcctgttttatgtgcacacattaggcattgagacttcaagcttttctttttttgtccacgtatctttgggtctttgataaagaaaagaatccctgttcattgtaagcacttttacggggcgggtggggaggggtgctctgctggtcttcaattaccaagaattctccaaaacaattttctgcaggatgattgtacagaatcattgcttatgacatgatcgctttctacactgtattacataaataaattaaataaaataaccccgggcaagacttttctttgaaggatgactacagacattaaataatcgaagtaattttgggtggggagaagaggcagattcaattttctttaaccagtctgaagtttcatttatgatacaaaagaagatgaaaatggaagtggcaatataaggggatgaggaaggcatgcctggacaaacccttcttttaagatgtgtcttcaatttgtataaaatggtgttttcatgtaaataaatacattcttggaggagcaccattgtgctggtgtgaatgattccatagtaacaatcttgaccatttactgacgtacagaccagtgagaagtcttcgcatgttgggtacccacacctgttgtgtcttaattgcaagtctgagtaggaagttggggccaacatgtgtctcccagtgctgggaaaatatttcatagacctaatttacagtctttacttgatctaaaacattttgctgccatattttggccctcaagtttgtcccaaatgagagacaaagggaaaagttccagggaaataaaaattaagacagctgattatctgtaaagcatggtttctcatcctgaacgctactaacattttgcagggaataattccttgttgaagggagttgtcctgaccagtgtaggatatttatttattttatttatgttttttgagagtctcgctctgtcacccaggctggagtgcagtggcacaatctcggctcactgcactccagcctgggagacagacgagactccgtctcaataaataaataaataaataaataaataaataaaaggagggcctggcacgaatgacatgcagggaaggcagtgagcaggtggaggtccctgtactcgttgtggtgccttatctaccaggcggttgagttgacgtctttgtggacagaattcgattacaaaggtgtccgaaagtctccaggtgggggagagttttgtagcgggcataatttgggttgtaaattgactgttgtctcctgagcagtctcctggtgagggagagtttcactggagctttgaaacacatgttagacagccttgccctgtagggagtgtctcgtgaaggagaggtaaacaattataattgcatttctaaagggctaagtaggacatgggaaactggaaaatggagaaaagaagagaaaaaaatagtaactcattctctttttcttagaaaaatgaggatacttggtcacatcctcacatggtgaagaataagatggtctcttcatttcccttcaacactagtcccatcgtgaggctctgccctcatgacctaatctaatcctaactgcctcccaaaggtcccacctccacatcccattattggggattagggtttcaacatagggatttgggggaaacacaaacactcagttcatagtgatatctgactgcgattccaaaggtctgaggacacattggccctgttgtttttgctgtgttgtccttggcctcaggtgaacattttagctttagattgcaacattttaagctaaaaacactaagctagaaaattaaacttatctcgtcacattctgcatggtgaacaaactcaaaactcacctgagtgtatcttgttttcatgagaaaaaatgaccggtcatctcccttgccctgttagggacagttagacatgactgctgtatgaagatatgtacatgttaacaattcatatgtacaagctactgttccattttgcctggcccaaggggaggtagctagctagttggggtagcagggcgaattaaccctaatataatagtacatttctaatgccaccaatgaaatgaaaaccagctctcaaacatggcactatatgggatggcattccaaggccaactcagttacagtaactacagctttaactttgatcattttgttaccagaaaggggtcccaatccagaccccaagacagggttcttggatctcatgcaagaaagaattcaaggcgggtccatagaggaaaaggaaatgaagttttaaagaaagtaggaaaataaagagtggttgctccataggcagagtgaacctaagggctgctggttgcccattttattgttatttcttaattatttactaaacaagggctgaattattcatgcctccccttggtagaccatatagggtaacttcctgatgttgccatggcatttgtaaaccgtcatggctctagtgggagtgtagcagtgaggacaaccagaggtcactctcattgctatcttggttttggtgggttttgaccggcttctttactgcaacttgttttatgagcaaggtctttatgacctgtatcttatgcagacctacaatctcatcctgtgacttagaatgacttaaccctctgggaatgcagcccagtaggtcccagccttattttacccagcccctattcaaaatggagttgctctggttcagacgcctctgacaattttaaagctaatgaaaaaaatgtctagccaaatgtatatatacatacatatataattatgaaaagataatgccttataatcttgattcttaaattgaggtatattgatagtattctcccaatggtctggggattaatcaataggtaatttatacaaaactgaagtgctgccaaatagaattataggagtagctgctgcgcaaaaaagattaatgagatttggggagactttgctgtggctaatatgatgggtcaggaagagtacaatctcagtacaattttaagttgtatttatcttatgaataattgggctattctttcatatgcccaagggccattttatagctctatatt

SEQ ID NO: 70 - DNA, 3543 bp, Homo sapiens
cgccgcgctcgggctccgtcagtttcctcggcagcggtaggcgagagcacgcggaggagcgtgcgcgggggccccgggagacggcggcggtggcggcgcgggcagagcaaggacgcggcggatcccactcgcacagcagcgcactcggtgccccgcgcagggtcgcgatgctgcccggtttggcactgctcctgctggccgcctggacggctcgggcgctggaggtacccactgatggtaatgctggcctgctggctgaaccccagattgccatgttctgtggcagactgaacatgcacatgaatgtccagaatgggaagtgggattcagatccatcagggaccaaaacctgcattgataccaaggaaggcatcctgcagtattgccaagaagtctaccctgaactgcagatcaccaatgtggtagaagccaaccaaccagtgaccatccagaactggtgcaagcggggccgcaagcagtgcaagacccatccccactttgtgattccctaccgctgcttagttggtgagtttgtaagtgatgcccttctcgttcctgacaagtgcaaattcttacaccaggagaggatggatgtttgcgaaactcatcttcactggcacaccgtcgccaaagagacatgcagtgagaagagtaccaacttgcatgactacggcatgttgctgccctgcggaattgacaagttccgaggggtagagtttgtgtgttgcccactggctgaagaaagtgacaatgtggattctgctgatgcggaggaggatgactcggatgtctggtggggcggagcagacacagactatgcagatgggagtgaagacaaagtagtagaagtagcagaggaggaagaagtggctgaggtggaagaagaagaagccgatgatgacgaggacgatgaggatggtgatgaggtagaggaagaggctgaggaaccctacgaagaagccacagagagaaccaccagcattgccaccaccaccaccaccaccacagagtctgtggaagaggtggttcgagaggtgtgctctgaacaagccgagacggggccgtgccgagcaatgatctcccgctggtactttgatgtgactgaagggaagtgtgccccattcttttacggcggatgtggcggcaaccggaacaactttgacacagaagagtactgcatggccgtgtgtggcagcgccattcctacaacagcagccagtacccctgatgccgttgacaagtatctcgagacacctggggatgagaatgaacatgcccatttccagaaagccaaagagaggcttgaggccaagcaccgagagagaatgtcccaggtcatgagagaatgggaagaggcagaacgtcaagcaaagaacttgcctaaagctgataagaaggcagttatccagcatttccaggagaaagtggaatctttggaacaggaagcagccaacgagagacagcagctggtggagacacacatggccagagtggaagccatgctcaatgaccgccgccgcctggccctggagaactacatcaccgctctgcaggctgttcctcctcggcctcgtcacgtgttcaatatgctaaagaagtatgtccgcgcagaacagaaggacagacagcacaccctaaagcatttcgagcatgtgcgcatggtggatcccaagaaagccgctcagatccggtcccaggttatgacacacctccgtgtgatttatgagcgcatgaatcagtctctctccctgctctacaacgtgcctgcagtggccgaggagattcaggatgaagttgatgagctgcttcagaaagagcaaaactattcagatgacgtcttggccaacatgattagtgaaccaaggatcagttacggaaacgatgctctcatgccatctttgaccgaaacgaaaaccaccgtggagctccttcccgtgaatggagagttcagcctggacgatctccagccgtggcattcttttggggctgactctgtgccagccaacacagaaaacgaagttgagcctgttgatgcccgccctgctgccgaccgaggactgaccactcgaccaggttctgggttgacaaatatcaagacggaggagatctctgaagtgaagatggatgcagaattccgacatgactcaggatatgaagttcatcatcaaaaattggtgttctttgcagaagatgtgggttcaaacaaaggtgcaatcattggactcatggtgggcggtgttgtcatagcgacagtgatcgtcatcaccttggtgatgctgaagaagaaacagtacacatccattcatcatggtgtggtggaggttgacgccgctgtcaccccagaggagcgccacctgtccaagatgcagcagaacggctacgaaaatccaacctacaagttctttgagcagatgcagaactagacccccgccacagcagcctctgaagttggacagcaaaaccattgcttcactacccatcggtgtccatttatagaataatgtgggaagaaacaaacccgttttatgatttactcattatcgccttttgacagctgtgctgtaacacaagtagatgcctgaacttgaattaatccacacatcagtaatgtattctatctctctttacattttggtctctatactacattattaatgggttttgtgtactgtaaagaatttagctgtatcaaactagtgcatgaatagattctctcctgattatttatcacatagccccttagccagttgtatattattcttgtggtttgtgacccaattaagtcctactttacatatgctttaagaatcgatgggggatgcttcatgtgaacgtgggagttcagctgcttctcttgcctaagtattcctttcctgatcactatgcattttaaagttaaacatttttaagtatttcagatgctttagagagattttttttccatgactgcattttactgtacagattgctgcttctgctatatttgtgatataggaattaagaggatacacacgtttgtttcttcgtgcctgttttatgtgcacacattaggcattgagacttcaagcttttctttttttgtccacgtatctttgggtctttgataaagaaaagaatccctgttcattgtaagcacttttacggggcgggtggggaggggtgctctgctggtcttcaattaccaagaattctccaaaacaattttctgcaggatgattgtacagaatcattgcttatgacatgatcgctttctacactgtattacataaataaattaaataaaataaccccgggcaagacttttctttgaaggatgactacagacattaaataatcgaagtaattttgggtggggagaagaggcagattcaattttctttaaccagtctgaagtttcatttatgatacaaaagaagatgaaaatggaagtggcaatataaggggatgaggaaggcatgcctggacaaacccttcttttaagatgtgtcttcaatttgtataaaatggtgttttcatgtaaataaatacattcttggaggagca

SEQ ID NO: 71 - DNA, 3355 bp, Homo sapiens
agtttcctcggcagcggtaggcgagagcacgcggaggagcgtgcgcgggggccccgggagacggcggcggtggcggcgcgggcagagcaaggacgcggcggatcccactcgcacagcagcgcactcggtgccccgcgcagggtcgcgatgctgcccggtttggcactgctcctgctggccgcctggacggctcgggcgctggaggtacccactgatggtaatgctggcctgctggctgaaccccagattgccatgttctgtggcagactgaacatgcacatgaatgtccagaatgggaagtgggattcagatccatcagggaccaaaacctgcattgataccaaggaaggcatcctgcagtattgccaagaagtctaccctgaactgcagatcaccaatgtggtagaagccaaccaaccagtgaccatccagaactggtgcaagcggggccgcaagcagtgcaagacccatccccactttgtgattccctaccgctgcttagttggtgagtttgtaagtgatgcccttctcgttcctgacaagtgcaaattcttacaccaggagaggatggatgtttgcgaaactcatcttcactggcacaccgtcgccaaagagacatgcagtgagaagagtaccaacttgcatgactacggcatgttgctgccctgcggaattgacaagttccgaggggtagagtttgtgtgttgcccactggctgaagaaagtgacaatgtggattctgctgatgcggaggaggatgactcggatgtctggtggggcggagcagacacagactatgcagatgggagtgaagacaaagtagtagaagtagcagaggaggaagaagtggctgaggtggaagaagaagaagccgatgatgacgaggacgatgaggatggtgatgaggtagaggaagaggctgaggaaccctacgaagaagccacagagagaaccaccagcattgccaccaccaccaccaccaccacagagtctgtggaagaggtggttcgagttcctacaacagcagccagtacccctgatgccgttgacaagtatctcgagacacctggggatgagaatgaacatgcccatttccagaaagccaaagagaggcttgaggccaagcaccgagagagaatgtcccaggtcatgagagaatgggaagaggcagaacgtcaagcaaagaacttgcctaaagctgataagaaggcagttatccagcatttccaggagaaagtggaatctttggaacaggaagcagccaacgagagacagcagctggtggagacacacatggccagagtggaagccatgctcaatgaccgccgccgcctggccctggagaactacatcaccgctctgcaggctgttcctcctcggcctcgtcacgtgttcaatatgctaaagaagtatgtccgcgcagaacagaaggacagacagcacaccctaaagcatttcgagcatgtgcgcatggtggatcccaagaaagccgctcagatccggtcccaggttatgacacacctccgtgtgatttatgagcgcatgaatcagtctctctccctgctctacaacgtgcctgcagtggccgaggagattcaggatgaagttgatgagctgcttcagaaagagcaaaactattcagatgacgtcttggccaacatgattagtgaaccaaggatcagttacggaaacgatgctctcatgccatctttgaccgaaacgaaaaccaccgtggagctccttcccgtgaatggagagttcagcctggacgatctccagccgtggcattcttttggggctgactctgtgccagccaacacagaaaacgaagttgagcctgttgatgcccgccctgctgccgaccgaggactgaccactcgaccaggttctgggttgacaaatatcaagacggaggagatctctgaagtgaagatggatgcagaattccgacatgactcaggatatgaagttcatcatcaaaaattggtgttctttgcagaagatgtgggttcaaacaaaggtgcaatcattggactcatggtgggcggtgttgtcatagcgacagtgatcgtcatcaccttggtgatgctgaagaagaaacagtacacatccattcatcatggtgtggtggaggttgacgccgctgtcaccccagaggagcgccacctgtccaagatgcagcagaacggctacgaaaatccaacctacaagttctttgagcagatgcagaactagacccccgccacagcagcctctgaagttggacagcaaaaccattgcttcactacccatcggtgtccatttatagaataatgtgggaagaaacaaacccgttttatgatttactcattatcgccttttgacagctgtgctgtaacacaagtagatgcctgaacttgaattaatccacacatcagtaatgtattctatctctctttacattttggtctctatactacattattaatgggttttgtgtactgtaaagaatttagctgtatcaaactagtgcatgaatagattctctcctgattatttatcacatagccccttagccagttgtatattattcttgtggtttgtgacccaattaagtcctactttacatatgctttaagaatcgatgggggatgcttcatgtgaacgtgggagttcagctgcttctcttgcctaagtattcctttcctgatcactatgcattttaaagttaaacatttttaagtatttcagatgctttagagagattttttttccatgactgcattttactgtacagattgctgcttctgctatatttgtgatataggaattaagaggatacacacgtttgtttcttcgtgcctgttttatgtgcacacattaggcattgagacttcaagcttttctttttttgtccacgtatctttgggtctttgataaagaaaagaatccctgttcattgtaagcacttttacggggcgggtggggaggggtgctctgctggtcttcaattaccaagaattctccaaaacaattttctgcaggatgattgtacagaatcattgcttatgacatgatcgctttctacactgtattacataaataaattaaataaaataaccccgggcaagacttttctttgaaggatgactacagacattaaataatcgaagtaattttgggtggggagaagaggcagattcaattttctttaaccagtctgaagtttcatttatgatacaaaagaagatgaaaatggaagtggcaatataaggggatgaggaaggcatgcctggacaaacccttcttttaagatgtgtcttcaatttgtataaaatggtgttttcatgtaaataaatacattcttggaggagca

SEQ ID NO: 72 - DNA, 2846 bp, Homo sapiens
agagttccggaggctttggttgtccattgttagcttagaagttggcgcagtgtgcgtgtgatccacgcctaaatagcacagccttgctgtgcgtggtagaagttgggttagtgttgacatgctgttgactcaccctcccgaggatggaagctctggcctgggtcaagttgtggtcactgcagttaacagtttgttgatctcagggagtattccacagttgctgatgtaattgacaatgattggagccagctcttccccagattcaaatggaccaattagaggacttgttggttctgtttatcaactatgtacccactgatggtaatgctggcctgctggctgaaccccagattgccatgttctgtggcagactgaacatgcacatgaatgtccagaatgggaagtgggattcagatccatcagggaccaaaacctgcattgataccaaggaaggcatcctgcagtattgccaagaagtctaccctgaactgcagatcaccaatgtggtagaagccaaccaaccagtgaccatccagaactggtgcaagcggggccgcaagcagtgcaagacccatccccactttgtgattccctaccgctgcttagttggtgagtttgtaagtgatgcccttctcgttcctgacaagtgcaaattcttacaccaggagaggatggatgtttgcgaaactcatcttcactggcacaccgtcgccaaagagacatgcagtgagaagagtaccaacttgcatgactacggcatgttgctgccctgcggaattgacaagttccgaggggtagagtttgtgtgttgcccactggctgaagaaagtgacaatgtggattctgctgatgcggaggaggatgactcggatgtctggtggggcggagcagacacagactatgcagatgggagtgaagacaaagtagtagaagtagcagaggaggaagaagtggctgaggtggaagaagaagaagccgatgatgacgaggacgatgaggatggtgatgaggtagaggaagaggctgaggaaccctacgaagaagccacagagagaaccaccagcattgccaccaccaccaccaccaccacagagtctgtggaagaggtggttcgagaggtgtgctctgaacaagccgagacggggccgtgccgagcaatgatctcccgctggtactttgatgtgactgaagggaagtgtgccccattcttttacggcggatgtggcggcaaccggaacaactttgacacagaagagtactgcatggccgtgtgtggcagcgccattcctacaacagcagccagtacccctgatgccgttgacaagtatctcgagacacctggggatgagaatgaacatgcccatttccagaaagccaaagagaggcttgaggccaagcaccgagagagaatgtcccaggtcatgagagaatgggaagaggcagaacgtcaagcaaagaacttgcctaaagctgataagaaggcagttatccagcatttccaggagaaagtggaatctttggaacaggaagcagccaacgagagacagcagctggtggagacacacatggccagagtggaagccatgctcaatgaccgccgccgcctggccctggagaactacatcaccgctctgcaggctgttcctcctcggcctcgtcacgtgttcaatatgctaaagaagtatgtccgcgcagaacagaaggacagacagcacaccctaaagcatttcgagcatgtgcgcatggtggatcccaagaaagccgctcagatccggtcccaggttatgacacacctccgtgtgatttatgagcgcatgaatcagtctctctccctgctctacaacgtgcctgcagtggccgaggagattcaggatgaagttgatgagctgcttcagaaagagcaaaactattcagatgacgtcttggccaacatgattagtgaaccaaggatcagttacggaaacgatgctctcatgccatctttgaccgaaacgaaaaccaccgtggagctccttcccgtgaatggagagttcagcctggacgatctccagccgtggcattcttttggggctgactctgtgccagccaacacagaaaacgaagttgagcctgttgatgcccgccctgctgccgaccgaggactgaccactcgaccaggttctgggttgacaaatatcaagacggaggagatctctgaagtgaagatggatgcagaattccgacatgactcaggatatgaagttcatcatcaaaaattggtgttctttgcagaagatgtgggttcaaacaaaggtgcaatcattggactcatggtgggcggtgttgtcatagcgacagtgatcgtcatcaccttggtgatgctgaagaagaaacagtacacatccattcatcatggtgtggtggaggttgacgccgctgtcaccccagaggagcgccacctgtccaagatgcagcagaacggctacgaaaatccaacctacaagttctttgagcagatgcagaactagacccccgccacagcagcctctgaagttggacagcaaaaccattgcttcactacccatcggtgtccatttatagaataatgtgggaagaaacaaacccgttttatgatttactcattatcgccttttgacagctgtgctgtaacacaagtagatgcctgaacttgaattaatccacacatcagtaatgtattctatctctctttacattttggtctctatactacattattaatgggttttgtgtactgtaaagaatttagctgtatcaaactagtgcatgaatagattctctcctgattatttatcacatagccccttagccagttgtatattattctt

SEQ ID NO: 73 - DNA, 3167 bp, Homo sapiens
gcgagagcacgcggaggagcgtgcgcgggggccccgggagacggcggcggtggcggcgcgggcagagcaaggacgcggcggatcccactcgcacagcagcgcactcggtgccccgcgcagggtcgcgatgctgcccggtttggcactgctcctgctggccgcctggacggctcgggcgctggaggtctaccctgaactgcagatcaccaatgtggtagaagccaaccaaccagtgaccatccagaactggtgcaagcggggccgcaagcagtgcaagacccatccccactttgtgattccctaccgctgcttagttggtgagtttgtaagtgatgcccttctcgttcctgacaagtgcaaattcttacaccaggagaggatggatgtttgcgaaactcatcttcactggcacaccgtcgccaaagagacatgcagtgagaagagtaccaacttgcatgactacggcatgttgctgccctgcggaattgacaagttccgaggggtagagtttgtgtgttgcccactggctgaagaaagtgacaatgtggattctgctgatgcggaggaggatgactcggatgtctggtggggcggagcagacacagactatgcagatgggagtgaagacaaagtagtagaagtagcagaggaggaagaagtggctgaggtggaagaagaagaagccgatgatgacgaggacgatgaggatggtgatgaggtagaggaagaggctgaggaaccctacgaagaagccacagagagaaccaccagcattgccaccaccaccaccaccaccacagagtctgtggaagaggtggttcgagttcctacaacagcagccagtacccctgatgccgttgacaagtatctcgagacacctggggatgagaatgaacatgcccatttccagaaagccaaagagaggcttgaggccaagcaccgagagagaatgtcccaggtcatgagagaatgggaagaggcagaacgtcaagcaaagaacttgcctaaagctgataagaaggcagttatccagcatttccaggagaaagtggaatctttggaacaggaagcagccaacgagagacagcagctggtggagacacacatggccagagtggaagccatgctcaatgaccgccgccgcctggccctggagaactacatcaccgctctgcaggctgttcctcctcggcctcgtcacgtgttcaatatgctaaagaagtatgtccgcgcagaacagaaggacagacagcacaccctaaagcatttcgagcatgtgcgcatggtggatcccaagaaagccgctcagatccggtcccaggttatgacacacctccgtgtgatttatgagcgcatgaatcagtctctctccctgctctacaacgtgcctgcagtggccgaggagattcaggatgaagttgatgagctgcttcagaaagagcaaaactattcagatgacgtcttggccaacatgattagtgaaccaaggatcagttacggaaacgatgctctcatgccatctttgaccgaaacgaaaaccaccgtggagctccttcccgtgaatggagagttcagcctggacgatctccagccgtggcattcttttggggctgactctgtgccagccaacacagaaaacgaagttgagcctgttgatgcccgccctgctgccgaccgaggactgaccactcgaccaggttctgggttgacaaatatcaagacggaggagatctctgaagtgaagatggatgcagaattccgacatgactcaggatatgaagttcatcatcaaaaattggtgttctttgcagaagatgtgggttcaaacaaaggtgcaatcattggactcatggtgggcggtgttgtcatagcgacagtgatcgtcatcaccttggtgatgctgaagaagaaacagtacacatccattcatcatggtgtggtggaggttgacgccgctgtcaccccagaggagcgccacctgtccaagatgcagcagaacggctacgaaaatccaacctacaagttctttgagcagatgcagaactagacccccgccacagcagcctctgaagttggacagcaaaaccattgcttcactacccatcggtgtccatttatagaataatgtgggaagaaacaaacccgttttatgatttactcattatcgccttttgacagctgtgctgtaacacaagtagatgcctgaacttgaattaatccacacatcagtaatgtattctatctctctttacattttggtctctatactacattattaatgggttttgtgtactgtaaagaatttagctgtatcaaactagtgcatgaatagattctctcctgattatttatcacatagccccttagccagttgtatattattcttgtggtttgtgacccaattaagtcctactttacatatgctttaagaatcgatgggggatgcttcatgtgaacgtgggagttcagctgcttctcttgcctaagtattcctttcctgatcactatgcattttaaagttaaacatttttaagtatttcagatgctttagagagattttttttccatgactgcattttactgtacagattgctgcttctgctatatttgtgatataggaattaagaggatacacacgtttgtttcttcgtgcctgttttatgtgcacacattaggcattgagacttcaagcttttctttttttgtccacgtatctttgggtctttgataaagaaaagaatccctgttcattgtaagcacttttacggggcgggtggggaggggtgctctgctggtcttcaattaccaagaattctccaaaacaattttctgcaggatgattgtacagaatcattgcttatgacatgatcgctttctacactgtattacataaataaattaaataaaataaccccgggcaagacttttctttgaaggatgactacagacattaaataatcgaagtaattttgggtggggagaagaggcagattcaattttctttaaccagtctgaagtttcatttatgatacaaaagaagatgaaaatggaagtggcaatataaggggatgaggaaggcatgcctggacaaacccttcttttaagatgtgtcttcaatttgtataaaatggtgttttcatgtaaataaatacattcttggaggagca

SEQ ID NO: 74 - DNA, 2366 bp, Homo sapiens
gatcccactcgcacagcagcgcactcggtgccccgcgcagggtcgcgatgctgcccggtttggcactgctcctgctggccgcctggacggctcgggcgctggaggtacccactgatggtaatgctggcctgctggctgaaccccagattgccatgttctgtggcagactgaacatgcacatgaatgtccagaatgggaagtgggattcagatccatcagggaccaaaacctgcattgataccaaggaaggcatcctgcagtattgccaagaagtctaccctgaactgcagatcaccaatgtggtagaagccaaccaaccagtgaccatccagaactggtgcaagcggggccgcaagcagtgcaagacccatccccactttgtgattccctaccgctgcttagttggtgagtttgtaagtgatgcccttctcgttcctgacaagtgcaaattcttacaccaggagaggatggatgtttgcgaaactcatcttcactggcacaccgtcgccaaagagacatgcagtgagaagagtaccaacttgcatgactacggcatgttgctgccctgcggaattgacaagttccgaggggtagagtttgtgtgttgcccactggctgaagaaagtgacaatgtggattctgctgatgcggaggaggatgactcggatgtctggtggggcggagcagacacagactatgcagatgggagtgaagacaaagtagtagaagtagcagaggaggaagaagtggctgaggtggaagaagaagaagccgatgatgacgaggacgatgaggatggtgatgaggtagaggaagaggctgaggaaccctacgaagaagccacagagagaaccaccagcattgccaccaccaccaccaccaccacagagtctgtggaagaggtggttcgagaggtgtgctctgaacaagccgagacggggccgtgccgagcaatgatctcccgctggtactttgatgtgactgaagggaagtgtgccccattcttttacggcggatgtggcggcaaccggaacaactttgacacagaagagtactgcatggccgtgtgtggcagcgccatgtcccaaagtttactcaagactacccaggaacctcttgcccgagatcctgttaaacttcctacaacagcagccagtacccctgatgccgttgacaagtatctcgagacacctggggatgagaatgaacatgcccatttccagaaagccaaagagaggcttgaggccaagcaccgagagagaatgtcccaggtcatgagagaatgggaagaggcagaacgtcaagcaaagaacttgcctaaagctgataagaaggcagttatccagcatttccaggagaaagtggaatctttggaacaggaagcagccaacgagagacagcagctggtggagacacacatggccagagtggaagccatgctcaatgaccgccgccgcctggccctggagaactacatcaccgctctgcaggctgttcctcctcggcctcgtcacgtgttcaatatgctaaagaagtatgtccgcgcagaacagaaggacagacagcacaccctaaagcatttcgagcatgtgcgcatggtggatcccaagaaagccgctcagatccggtcccaggttatgacacacctccgtgtgatttatgagcgcatgaatcagtctctctccctgctctacaacgtgcctgcagtggccgaggagattcaggatgaagttgatgagctgcttcagaaagagcaaaactattcagatgacgtcttggccaacatgattagtgaaccaaggatcagttacggaaacgatgctctcatgccatctttgaccgaaacgaaaaccaccgtggagctccttcccgtgaatggagagttcagcctggacgatctccagccgtggcattcttttggggctgactctgtgccagccaacacagaaaacgaaggttctgggttgacaaatatcaagacggaggagatctctgaagtgaagatggatgcagaattccgacatgactcaggatatgaagttcatcatcaaaaattggtgttctttgcagaagatgtgggttcaaacaaaggtgcaatcattggactcatggtgggcggtgttgtcatagcgacagtgatcgtcatcaccttggtgatgctgaagaagaaacagtacacatccattcatcatggtgtggtggaggttgacgccgctgtcaccccagaggagcgccacctgtccaagatgcagcagaacggctacgaaaatccaacctacaagttctttgagcagatgcagaactagacccccgccacagcagcctctgaagttggacagcaaaaccattgcttcactacccatcgg

SEQ ID NO: 75 - DNA, 2227000 bp, Homo sapiens
acgtccggctaatttctgtatttttagtagagacggggtttcaccatgttagtcaggctggtctcaaactcctcacctaaggtgattcacctgcctcggcctcacaaagtgctgggattacaggcatgagccaccgtgcgtggcctgatttaagaaattttaaaagacgcaaataaatgggtgtatgttctgtgttcatggactagaaggattaatattgttaaaatgtccatgctactcaaagcaatttacagattcagcacaacctctatcaaaatgccaatagcatttttcatagatttaaaaaaaatctaaaattcaaatgaaacaacaaaagaaagagaatagccaaagcaatcttgagaaggataagcaacattggaggtatcacacttcctgattttgaattatatgacaaagctttagtaatcaaaataatatagtactggcataaaagcagacatatagaccaatgcaacagaatggagggcccataaataaacccattcatatatggtcaactaaattttgagaagggcaacaagagtacactatgaggaaaggatattctctttaataaatggtgtttgaaaaactggatatacacatgctaaagaataaaattggacccttacatcacacaacaaaagtcagctaaaaattgattaaagaattaaatgtaagacctgaaactacaaaattcctagaagaaagtgcatgaaaaaataaattctcgaaattggtcttggcaatgattttttagatatgacatgaaaagcacagacagtaaaatcaaaattaaacaagttgtactacggcaaaccataaaccttctgtacagcataggaaacaattaacagagtgaagagacaactgtggaatgggagaatatattagcaaaccatatgaccaatatgcagctttcatccaaaatatatgaggaactcagagctcaagcaaaacacacaaacaaaaaacaaaaaatctgattaaaaatggtcaaagcccctgaatagacagttctccaaagaagacatgcaaatggccaacaggtatatgaaaagattctcaaaagcgctaatcatcaaggaaatgcaaattaaagcaacagtgaaatatcacctcaaacttgttaggatggctattatcaaaaagataaaaaaaataacaagttttggcaagaatgtggataaaagggaatccttatacattgttggcgggaatgtaaatttgtatagccattatggaaaacagtatggagattcctcaaaaagttaaaatacgaatgccctaggatcaaattaccactcttttgggtatatataaaaaggaaatgaaatcagtatctagatgagatatctgcactcccatgttcagtgcagagttattcacaatagccaaggcatgaaaacaacctgagtgtacatcaacagataaattaataaagaaattgtgatatatgtaaatataatgaaataatatttagcctacaaaggaaggaaatcctgctatttgtgataatgtgggtgaacctgaagaacattacgctaagtgaaataagccaggcataggaagaataatactgcatgatctcacttacatgtaaaatctgaacagtcagctataaagaagcagagggtagattgattgttaccaagggcagagggagggggagaatgggaagatattggtcaaaggacacagagttttcattatcaggatgaataagttctagagatctaatgtgcaggataggggctatagttaataacactacagtatgcactaagagagtaatcttgagtgttatcaccaaatacacaaaaaaagggtaaccatgtaagaggatggatatgttaattacttttactgtagtaatcatttcactatatgtatattgaaacatgttgtacaacttgtatacatttttacaaaaaattaattttcacaagcctcaagacagacttatgaatagatgaaacagaatacggaaaatatctgaaacaggaaggagtccagcattttagaagaaaaaatagaagtccattgtggctggaataaagtataaagaggaagagaggcaagagtttaagctggagaggctagtagaagccaagaatacaacaaaaaaaacacatggcatttatgctattctcaatctctaaaatagatatgctaatcaccgaagactttttatgtaaaatagcagtaattgatataccagtattttcagagttgtgtggaatgatatgtatattattttagagaaatcttggtggattcatatggactcaacttatctttcaggtttatttcttgcatttataaattatatctaataaactataagttactgattgttgtgtatatcttgatatatagggattatttgtgtttgttatacaaaaatcaaatggaagtagaatagctaaaatgtatgagtacttgcacacaaagcacacacacacacacacacacacacacacaccataaccccttaggaaaacactatttcagaatagcgatattggcatatttcacatatgctaaatgagttattccttatagtttcataatgtaactatgaaaccagctgtctgtttactttttgtggtaggggggatagctttcctaacaaactaaatacctaatacaaatctgagaggaaacatatgattttattaatttttctcatgaaaacacttaaactttcttgtgttataatttcaaaccataagtgcccccaagacaggcaaacttggaagttttagagaaaattatacggtataattgataacaattacagtttcttttaacaaatactgattcacgattagtatttttaaaatacaaaatgcattttcctgaatagcatttatttacttgttaaagaagttgtgtaagagattcagctaatctaatttcttactttgtgaagaaatcactcatctaaagtcaaaatatcaagtataaagtctacccttgggagaagcatacagggtgccagactttaaatatctccagtgtgcaaaataaataatattttcttgaaatatcctcttatttgaaaatttgctatagagtcacaagaggcaaattccatttgagaaagtgcatgctatattttacaacgcagaaatgtggagctgagcacacaacatcttattgcaaaagtacaattcagaagagagtttttacccttaaaaggctgtgaagataagtaaaaatcagccaaaatttcagtgtgaataatatgatgtttggcgaggaactctactattgttacacttaggaaaataatctaatccaaaggctttgcatctgtacagaagagcgagtagatactgaaagagatttgcagatccactgttttttaggcaggaagaatgctcgttaaatgcaaacgctgctctggctcatgtgtttgctccgaggtataggttttgttcgactgacgtatcagatagtcagagtggttaccacaccgacgttgtagcagctgcataataaatgactgaaagaatcatgttaggcatgcccacctaacctaacttgaatcatgcgaaaggggagctgttggaattcaaatagactttctggttcccagcagtcggcagtaatagaatgctttcaggaagatgacagaatcaggagaaagatgctgttttgcactatcttgatttgttacagcagccaacttattggcatgatggagtgacaggaaaaacagctggcatggaaggtaggattattaaagctattacatcattacaaatacaattagaagctggccatgacaaagcatatgtttgaacaagcagctgttggtagctggggtttgttgccgagctcttcaaactctgcaaacagtgttgcttttacagaatggattttaaaattgccttgtgctgcgttagattttggggagggggtgtgcttgcctccaacctcaggaaaacacttctgggatagaaatcagtgttagaagattttagaataaagtattgttcaggagtctaggtttcttcaggtagatgatgacagggggaaaaaaatcttcggggaaatctaccccagattagttatatgcaatttagttgcaagaactgattgatgtattggcatattcagacagtgagagaaatgagaatgtacagaatgtttggataggttgaaaattgttatacttggtttctattttataaggagtttggctgtcagtcatttctcctcatcaatttctagcttttgacatttattcagtcattctgcattatatgaagaaaatatatcaatatctcctgcagggtttttcaacaactctagcatctgtttcagctattgaactgtattcacgttttgccaagttgatgtcgacccagctggtctatgatttctcgcttgattactgctcttaatttctctgtatcagcttgtttcagatagggctttgaaggctgttaatgaaaaatgacagaagtgataaattattgaaaatgtgagcatttatttatttatttatttatttatttatttattttgccctttaatgagttttgtcttacattctttcttgcctgcgtacgatttttagaaccctttctctgttttgcaatatttctttcccctacaatcagtggattataattataagtacttttaagcaaatggagcatgagcatggacagtatttggctccaaaaataaagtttttggagaaaggggagcaatttatgctttttgtataaactatgcatcgtttctataacctatcttcacatgctgtcatggggatctgtcagtgactgtaatcagactgaacatattgaaataatctttatcaccactagggtaacaagcaaataaaacattcaaacatttaacaagtgattgtttaaaacagatgttaaataatatagaaatagattttcctaagtgtgaaaagcctgattattaactgtctatgtaatacagaatctttcggctctctacccagtctcctccatagcctgaggagctaaatcatccaagttaatagactatcatatatgtacatctaatatgacctttcagtgtacacagtgctactcgtatgtgctgtgccttttctgtagtaattgtaatatcccagtcagtctggttaaggaacactattggctgttatgtaactttttttctgaatgttagtccatggttttcaattacgtattcctcttagaaagggtgagttaaaaacaacatgtatttaaatatcagtaaattaattagcaagtggtgggctaattacactaggatttctccaaaataattgctaacttctgttttgaaaaatagtcaaggatttggatgactactttttaaccttgaagcatacattaccgtggttgaatatcattcataattcatatatacagcaggaaagaaaatagttttctagatgtatcattttagcagcaaagaatttttttttataatgtggttcaggcactctgattatttccgtttaatacttttaagtactgtagatgcttttgtatagtgtgttacagaacttggttaatctttgggaagctcaaagactgacagaattttgcatccaaatgctacagggttattttgtggttggttgagaaaattcagctctgtctatactgttgtttaaaatacagccctctttggccaatgttacttttcaactttttataaccgttttaagtgaccattcaagactgtaaaaactcttttacactgcatctttagtaggactctccttttgtgaattgtctccttcgaaaaaatgtgagcttccttctagcctcactctcttgttaccatagttacttttaaaagaaggtttttctttttcaatgaagatagcgtactttaaatcagccactggaatccccaaactgtgtttttgtattttttagtttatagtttaggcttgcttcatttgcggttagaaagtgctctgtatttggtcccactgatgaatggattggacagacgctaggtggcaccagctgttgattattaatgaaatcgtaaagtctatatgccacgcacctgaagagcaggcaaacccttattgataaatgcattgtaagagctggaaatgtctgccaatatttcttgctctaaaacagggtcagcctgcagagtgatgagaccacgtgaagtcttcaaatcccaattgcttaatcctgtgtcttctgaagtgctttaaggaagaaaaaacgatgaaggagaaatgcataaaaatagaaggtgtgaaagagaagtgggacacaatgaaatagactgcaaacattttaatatatttttaaatccagaattagtgacttttataaatctatgtgagttttccccaattctctcaaactcagattgttttctctaaggcatttatattctaaaacaattatttatctcttttaggtaaaaattttattgagcatcattattttttaagtaaaaaaatctcccttatttctctttttgtgataagactgtcaagtgaaatttcccacatgagctagagtagctgcctctcaggtgttgctcttcagaaagatgagcaggggaagacactatcggttaagaaatatgctttgaaatgttttgcctgagaagcttgctccatcctattatcctcccattctcatataatccatcttttaagaaggaaaaagcaaataaaaacaaaccacttaagcatgtgcatacacacacacacacacacacacacgctttggaaaaaaaaaaaagtcagaactgtttaaaaagagaaagccacgacaatattttagttggtcctggagttaataaactaaagtgaaaaataggaaggaaagtccataattagattgtggagagtaaataattacttaaaactggaaatatttttccagaaaaatatgcaatattttttcttcactgggagtaactgacaattcctgaagaaggtgagatggtttagaaagagtgcaaagataatatatgctgtgattctccaatgttatctgaaaagtatgtaatatggctagttatcttgattatagcatggactttggtaaagatttttatgatgcccatatggtgaaaatggagaaatatttgctgtttgacataagagtctggtcaataaatcagctggctaaatgaccctgcctgtgatgtatcaattaatgaatcacagtaaaccaggaagagggcctttcacaggactatagcatagttctataaaattggttccatctgacttgaacctaatcttctgtaatgtgccttatgtctctgttcttgaacctacttggcctgtgaaatattaatgtccaaaaactgaaggacgatccagatagcctgtctatctgggaagcagaacaaatacattgaactattagggtaccaaaggattatgaccacctaaaaactgtggtgaggtcaaagagaataattgtaataggaataagtataacatcctaagctaaggttcataaaatcaatctggcaagtacaggacatgagagagttaaagcttagtaataattaattgaataaatcttactgattttgttggtcatcattattatcagtcataattcatatgacatcaaaatacaatgaaacaaagtaatattgttagacatgtatcctgaaaaaggaaatgaaaaaaatgagaacgaattttagaaggatatatatgatataatggtgtgtgtgtgtatatatatgataggtatggtatatgtatatattatatgtggtaatatatacatattttagaaggacaccatgatctaagaggaaccttaacatttgggggtatgttcagtgaaaagtgtctgaatgctaaaaggtcctacaaactataacatttgaggggcatggaaagtactagaaaagtgaaaagttgaagaatacttgaaggaaaaaagtagagaaaattaagctgatttcaaatattcgatgtgctataatgcagaagagggtttagactcacttgcacctctttggtagcaatggaaaagtattcttccagttaatgttgtgagcagagaattgattactttgtgagacactgcactccttattcctaaagtgttcagtgctaagaatggagtttctgcactaaatggaaattgaagaagatgtctgagataatttttaactaagaatctgtgagtccaatcatttcttttaaaaacatgttcttttttttagacatttatttctctgagggtctctactactccactcgcatcatccaggctaggggtcagtaaatgatagtccacattgtcacatctattactgtttgaccagtcatttaaaatggttttcacgtttctgaattgtttcatttcaagaatatttctgacacatgagattatataaaatttcaatttaagagtctatagtttatttggaagacagccacacccatttatttgtttatatgctatataggactcctttcatgctaaaacacagttgagtacttatgacagagaccatgtgggccacaaagcaggaatatttactatctggccctcgataggaaaagtttgctcacctcatctctagactataaagaaattttgttttttgcttattgactcaagtatctaaacaagcaatgtaacagttaaataacagttctataccataaacagaaattgtaaccacccatactacttaagtactagagacttggaaaagtagttcaaatatgcagcctaacagataaagatggtttcatttggctgttagtctattgagataatttacttgttgaggaatgtttatttaatgtttccataaaaaattgaagtctctgcaatcattgacttatatataatatctgcctagtttgactccattaatcttgctgaatttacctatttggtaggattctgttatttttattgctgcttttccgttagtgtatgatttcagtagacttacagaaagggtgaaagtcaatggaaaacaaggtaaagtgagtggaattttcttcttgcagctaccctcttctctcttcgtgggtttatagactctctcagcagctttggaattgcagttttagagacttacttttataacattatgagtgtgttcttgatcaaatatgttctagaagggatcaagataaaacaaatgcactgcactataaaagaacagttaagggttttagtaaatgattgataagacatgctaaatttaagaattagcaatgagttatttatattttcctgaacatagggatatgagaagggattttttttcatgtcataggagaaactataatcaaattctaagcataaagctgagggattctgaatttaccaccaaatattacaatctccatagttccataatgtgcaactaaaatccccacattttttttctagggaaagatataatttctgctcactggtagcgctggaaattcctgtaaaacccataggattcttattgtatttccatgaggatgttcctgagcagctactttgtgatgcctgtctctatggtaacagacacaaggcttaagggtctgaaagaaattcttcctgttggcttaggaatatggagcaatgagggagacccactgaagactataaaactgaggaaaggcaaaagaggcaattgagaaaaagttgtcgtgggggagctttttttgtgtatttgaaaataatttcacaatttcatttgctcttaatatatctctgaatgaaataagaaccaacatacaagtaaagttttacagaaagaaaaaattctgtgaaagtattgttttttaaccatctagtcaattttatgtaattgaagtcacacagattttttctttagttggcttgcctttcgctactcaagaaaagattgcttcttgcctgaaattggtaagaggacggctctacccctggcaaatttagttcttgttactgctatcaaagatcttgatcttttaaaggactttctttttcctgattccaagggtaagaatattgaactctggttcacattactcataatcactgagcttctcagggaattatgaaagtacactagccttccaagatgttcttttttaggtctatttctcttaaagaccagtaataaatagagcaaatagtactgcttatttgaaaattgggtatttcgtaagaggatgctgggtgagagtttgtgtttttacatgttttactttgtttctcttattaaaataacaaaaaagcaaacaaaaagctcctagaagtttaaaaatatttgattttccatttatttgacttcatcttactttcagcttagcaaatagggacacatcacatttgaattgttttagaaaggagataaatatgactctcctttcccttagattcaaagtatatgttcaaggtgtcatcaaatagccaaaagtctttaaaatatttatgctatgtaaatgtccttcaggaaaatataagtcagagggaggagatggccgtcttagtataaagctctcatgtgtatttgcagtgttaacatgagtgttgatgttttatttatcttcttaacatgttatatctgcacatgtcttcatttgttatatgttagggtcaacagaaaaaataataaagttattgcaagtaagcaaaaacttataacctgatcaataaaaattaatattttaggttggaagataaacacatctcaaatgtcattttataagatcaagttaacaaatgttagcatgcttaaagctttagaggaattaaatctttttatggtttattttctgaccttgagaaatttatagactctgtgcagatatatgttttcacaaatttaatccactctatatagatattagtaaaatgtaagacagtgtcttcagtacctgttcacactatctttaaattaaatgaaaaaactcaagttagctgtaatgtttcagtgtctcctttgatagtgttggaaagcaaattttttaaagaaaaccttttttataactccatacattttgacctatagatactaattgcaatataaaatgtgacatctgaataaaacaagaatactttaaatattcaatatatatactacttttgaaaagatgacttaaattataaacatataaattatatgcctaacatgactggcttccaaaaaacttattttcttgagctttggggttacagcctaaagtgcactgcagtaaataagcaaatgggtaaaaatattgtctagacaaaagtaaaactgagatgttcttttgagcaaacgtttatagaggaggtacaggatgacaactggaaacgtaggtggtacgcagagattaattgctgtcaatgtacacctgaaggtaaatggatggtgcttatcaaatttccagaagaaatattgacattatgttgcaatttgaagacagggttatgaatacaaagagctaagggaaaataaacttatcagcatcattcagctctggtcatgacattgttacaactgattataacactcccaggataaaatgtgataaggaccatcatagtctgtttttactagtacagatttcttttatacatgctataagtagaattgttcggtccagcaacaataagctggattattgaaagtgacactaatgctaacctgaaattgtatgggttttaggggagatgtgggactcatttatgttctatgacaagtgtaaaaaggagattaagtaaaagcctgcatgtgatggacacattagtgagtaggaatctcaggttcctctccctttggctgctgacccattcatgggctggttttggtggccacagtggcaggaaacagagtctatttctccattaggtcatccagacaggattagagcccaccaactgaaatgaaaggttgtttctgctgcttttcattcatccaacaaatatttattgataaattctaactgccaggctctgtgctagagcaagatgactaagatacagtccctgaggaatttagagacgaacgtggtttatgtggatgagaagagaaaaatatttacagtgaatagctaagcagagagcaacagcaactgtgaacccagacagtaaagctgacttaggactgagctagaggtttccggagttcctagtgtgagtgatgtggaaaaactggcaagtccatcaaagagcaaaatgataactgaacagaaagaaagcaaatccagtgaaaaatagtaattcaaagtaaagggtaaagcgacatatttgaagtgtcacttgaaataaaaaggagcatgccttccacctgttgctcatcttcactggaatcaaacctagaaggaaaatgtctaggctggtctaaaagccagttgcatacaatgatattaaatatgattaaagctagcatgagcatgaccatgcaaactttcaggaggatttgaaaacagttacctcccattggtagtttatgtacgtctatccctggaaactttttcctatgctatctttagagaccttgtcatattttatctcaatgtctaacactctttaattagaagctacctgaaaatgtttcactcatgtataaagttaaattaatcacagaatcagacctcagaggttacaaaggagggctgaaaggataacatctcagatagaatagatctattgccaaataaacctgtaacaataagaaattgtgttagataatccgtaaggttttatccaatttcaacatcttccaatttaattgatctccagcctcacacccaactcctcctaggaaattaaaaagagacaggtaaacaagatattttctgaagaatcgaatcatccagaaagtcattctctctcaagcagtacattttctaaagaatttaattatcgaaaaaagtctctctctctcctctttctctctcccttcttctgacatatatagatatgcatatatacacatatatgtatatatttatctatatatctatttatatctctgactcgctgaagtaacttagatatataggctaaaggcaaagaaaaattcctcccaacattcattagtaatttccctttatagattaaggaaagtatttctgtcctccttgatttttaaaacattttactgaactataacacgaatatataaaagttcacaaatcaataggtgtccagcttcatgaattttcacagattgggcacaccccagtaattactcaaggcaagaaaagaatattaccagcatccaaaaactttgtcttaccacttcctagtcaatactctcccagaggtaagtggaatactgacatctaacacaccattgattaggacagacagttcctgaaatgtatgtacttgaagccatacagctgtactcttttgtttctggctcctaaatctcaacattctgtttgtgagatctatctaatttgtttcttgtagttgtggtcccataattttcagtgttgtgtagtatgccatcatataaatgtcctataatttacttattccatctactctggatgaacatttaaattgattccatttgtgaactcttaaaaataattccactttgaatattcttgcaaatttactgcacatatgcatgtagttctgttatgtgccaagaagtagaattattaggtcatagaatagtgaaatactcatctttagttgaaaatgccacgtagtttttcaaggtaggtaaacaaagaaccatcattactttatagaagttctggacatgtcaatgcttagcattattagtctttaatttcagcctttctggctgttatactatagtatctcattgtgtttctcatttccatttttttctagtgactaattaatttgagaaccattttttgtgtttattgctcatgtggatgttatctatagtaaggataacatttcctcccaactttcattagtaatttccctttgtagattaaagaaagtaattctatcaacttgatttttaaaatgttttactgaactataacacaaatatataaaagtgcacttttctaatctcatgctcatttttctattgatttacaattttggtttttataggtatgagatctttacatttttatatggtccctacatttattgtatgtgttgcaaacatctagacagatatcttttataggaacttagaatttcaaaacccggagaccattaaagaatatttagtcccatatcttagtttgaaagatgaggaaagtgtgacttatagagaaattgtcatttcttttaagtttcttccagttagtagtaaggccagatacgtaataaaagtctcctgacactgaagtaaagggtttttttctagtaaaccatgtagggtctttagtcttgtctaatactgtgactcaaactccttgtctcttttggaaggccacaaaatgcgtgacatagtaattttaatagcaagtatagagtgatgcgtgattaatctcattgattttgtgaacaaaaatatcttcagctaacaaactgttgtatagcatggccatgcaatatttaaacctgtatgggccgggcgtggtggctcatgcctgtaatcccagcattttgggaggtcgaggtgggtgtatcatgaggtcaggagttcgagaccagcctggccaatatggtgaaaccccatctctactaaaaacacaaaaattaggtgggctcacgtgcctgtagtcccagctactcgggaggctgaggcagaagaatcgcttgaacccaggaggctgaggttgcaatgagtcaagatcgtgccagtgcactccaacctgggtgacagagtgagattctgtctcaaaaaacaaaggaaaacaaaacaaaacaaaaaaaacctatatgttcttttcggcatcagattttatttttcctctttcataactttattattatattcagtttcttttcacatttattcttattacttggatgttcccattccaaatttggttctaattcaaaaagttttcattttctatagtggatgaagaacaacataaattttacaatactttcttttagtgagataaaatttagtttacaaaacataattactagtacattaatatttactatttatttttaacatgctaggtgcagttcatgcgttattttagctaatctttggaacaacccccgccaaaatgttttattatgcctagtttatagatctagaagctgagcctaagtgagattaagctacttgtgaaacagctctaatcagaaccagatctttataagattctatgcatttcactccttccatgatctacttctgtacctgcttggaaggaaattgagttagtgatacagatttgggtcactacctgcctttagttcttctgccatacataggtcttagggataacctctttttccaatatcattaaataattcattttctgtatcttttttttccaaaacggtaattagagaagtcacttcgttggccttgattttattcattgtattgaataaatacaattttctaaatacggaactcttattcatgtgcaacctaaatacggattaggtgagttaatatccagagaccagattattactaaacttttcttgcatttagagactgaacttattataagaatcttttaattctttttagcaacctattccaaggttgattacttctcatgcatattttagttccaaatatttctttctctttcttgttcattggagaagcattccacagatgcctgagaaacaacttgctctcagtctctctatcttctagtccttggctagagtccccttgccacacttccctagcttcatgcagagtagatactcaatagtacttccacttagaaatttaaatccagatgagttacctagcatgctactttcctcttaaggagtaagtgaagcaaatgtttatagttgtttcactgtatgtgaacaaataggaatgtcaataaaacaagtacatttaattcataagtacttgataatcttaattccttaaatgtataaagctttaaaattaacaaaatactttcaagtttaatttattcacataggaaccatatgaggtaagcaaggtaggaagtcttatttcctctttatagagagccatgtaactaatttctcctatttgtatcctaaatttcttttagctctgccatcccccctccatatctcctgacagtcaccaccttagtttagatccccatatctgacttcgaatacactgatagcttcctaatgtaccttccttcttgcttctctccagtttacccttcacaaggctgctaggcttatctctctcaaagacaaaacttaataagttattccactgcttaaagtccacaggtggctttatattatttatagattataattcaaataacttgcatgaagagaaggtactttacaacaatttccctgccatgtgctcagtctaatcttatatccaccatgtgaatgcctcaccctagccatacaaacagttctctgactgtaacacacttccttttcatgtgcctttggaaatgttgactccatcccacagtcataaacaattcttattcacatatatttacttggtacatgctttataatcctccaaaatagtgtagctagtgcctcttctttacttttggctgaatcatgcacccctgtgcatagaatcttcctaatacttgtttcaccacttattttgctgtgatgtacttttcaggttattgatttattcataaactattagtgcctgagggccatgaattctctattctttttttttttttaccctttgcttagctcttctggagggagctactcaagtttaacttaaagtagtaatgagttacacagccagtaagacatttgtttgagtcctaaggtgacatcatttccattgcatccttcttccctctaatattactaaccatagtacacgagcagtactattgtcaagattcctcctcattcagtttagggaaatgcgttgacccaagttaccatttttgtctatttcacaccgtaaaagtcgggatatttagttatgatggtatgatagttaccctacatggtattttaaaggctctatttcctttgtgacttacacatgacctccccagaggtcttaatttaatggaatcatcacctaaaataatagaagagtaaattgacagtttcgtttataaggtacatggattcaggcatattggtaaagtaacacaaagcaaaaatgtggttcttcatttgtcttgtttcatcactaatagaaaatgatggagttcaccaatcacccaattgtactgtgcagcatggttattgtaaagtatacctgaaattaaaagcaaatatctacttccattttttccactgaattttcatcagaaaatgagaactacatactgaaggatttggggttggcgaatagcagatgtataatgccagcaatatgaaagcagagcaaatgcgtgattggtttacagcctcaacttcagtagtactctgcaaagtctgccagcacacaggtgccttgaggctgcaaagagcgtaggaattcagtggatgtatcaaatgatatgagatgttaatacctacttccttctaatgcatagctttgtgatattagaaaattaataaagaagtgaacaaattaattactttataatctcctaaatcttctctgtggaaggaaaatctcaaagatgcattaagtatccagcaaattggttttgaaattatccattattaaaaagcacaattctgtgtaacaggaagccacatgccaagagctatgtatatttaatcatttatgtcgatgctttttgtagcaattctgtttattctctattgacattatatacagtcctttttatacatagtggaatttaatgtgctgtgtttaaaagacacatcaagcctgacagaatccaattgtatacattatacttttaatttattagaaaatgaaatgatcatttgtgggcttatattagccaaagcagaggataaattttattatattaagaaaatcaaatactgtgactacatttacaaacattgtaaacatgacacttgttgcataattaataaatgaacatattgacctttaatataaaacggcatgaaaggaaagggaaggtggaagatataaccacaatcagaagtggaaatgaactcaaaatctgtaactgtatattaaagaaacatgtgattcatgattgcttttttgccttttccattttgaggcaatagtgccatgttgatattcatttgtgctgtcaaattaagggaaaacattgacaatctttaatataacaaagatagagaataaatgcaggtcaaaagtgtgtgggagaataagagaattgatcacattttaagaacaattacccatgtcactgcttaacccaacgtaatgatgtcaaccagtaggatggaagccagcatcaggaagaatcattttccaagcagatggatctgctgatatttttaattgattgaaggagcgttccattatttttaatcaaaaactaatttcaaataaaatggaaacttccatgaagtttgcaaaaatctgtatgcattaaggctcagactaatagaactacaatgttgtgatagttaataatccattatttaattataatgattattgttcttaacacattacacatgggagtttgtgggaactaccctacctttcttgcttctcaggtgagacaaatcattctcctagtggtctcaagtggtactgaacctcattttatcactgatgacatgctcatgaaactcacactgtactggtgttcttttctccgtctcactcacttctttgctgtgcttcctgggatcacctccgaaataagttgctggcactcaaataatttgctcagggtctacttctggtaaaaggcaacccaagacaacatgatattttattattaatagttttcctcatttaattttatatataatcatttttttctgacagggaagtatatttgaggaaataatgagggcaattatcaaaatatgcattggtttgggagttagagaaactgtcagaagtgacacaccaattttgctacatcgtgacttggtaacagtcattaccattctgggccttttattctcttctgaaaaaatggaagcattcgattacaaatcattaaagaataaagaagatagaaagtgatagaaaagataacaaatgttgatcacaccatgtgcaattgcttgatagtagtttccaggagtactataacagactgagactgtatctacttggaactcgtgggataaaataccattatttgatgccgtatgtgctcggcatgaatgcagtgggaaggatagaaaatatttcatatatttgccaactgtagaatatactgtaatagatcaagtttcattttaaaaatacacaggacacatttttttaaaaatctcatatgaaagcccagcaaagaaaagaagaattgaaggtgtagacatcttgaatgaaaacaagaggacgatttgattcaactgccatttattccaactttcaccctataaccccatagacacagctgtagaaaactgagatcttgaagaaagccactgaattagataatatctacgactacttccaactacaaatgtagaaataattgtctttacctactcatcctcagctagaaagcagctaatgggctactttaaatgtgtgatgctttcacaaattaagcaagactgagtacaacaagcacaacaagtccaacagcacaagttttcacaaacagtattggatgtaacaatacatccaaccagtattagatgtaacaaaaattggttaatttcctaatcaattaattaggaaattttattttctaacctgttggttgccagttatgggcttaagatggaagccagcatcaataggtttaaataatacctttgttttaaaaagaagaagtctaattcatagtcaaacatgtgctttggctaagtggctttgttctgggttttgcatgacagctggtgataaattgggaaaatgtgtaagtagcactgtggtaaggataatgttgatgaagatagaatgtttgaggccactttcagggagaataaaaacgacataaagtaatacttaagactgaattttcttagagatgataatctcatcaccaagcctcattttgccattgaaaaatttcttatgaattcaactatcatatttacatcacaatagacagtattataactctttagcatagggattttgctttaacttactttcaaccaatttatatgttaaagctatttatatctctgctgtttcatgaataaagcccagaggtatcttctttcttgactcactgtcatatcttcacatttcatcacatttttgcagttcaaatatcattcacttagtaacactgaaagcatagaaagattaatcagaaatgatttctgccctcaacaagctgacactggttagagtacaaaagccacactgaaagaatatatggagatctatgatctatgatcaatgatctttgaagttactattgtcatttttgggggcaacatgagtcatgcccatatgaaataacaaacttaatcaatgttgtgtgtgttctgagtgctctaccaaccggccacccccacccccccacatctgtctccctctccttggacctttctattctgagacaaaccaatattgaaatgaagccagttaacaaccccacagtggtctctaagtgttcaagtgaaaggaagagtctcacatgtctcatcttaaatgaaaagctagagatgattatgtttagtgaggagggcatgtcaaaagctgagttaggctgaaatctaggcgtcttgcaccagacagttagtcaaggtgtgaatgcaaaggaaaaattattgaaggaaattaaaagtgttacccccatgcacacatgaatgaaaagaaagcaaagcagtcttactgctgatatggataaaatttaaatggtctagacagatcaaaccagccacaatattcccttaaccaagagctaatccagaggaagatcccaactctcttcaattctacgaaggctgagaggtaaggaagctgcagaagaaaagttggaagctagcagaagttggtttatgaagtttaaggaaagaagccacctccaaacataaaagtgcaaggtgaggcagcaagtgcagttggagaagctgcagcaagttatccagaagttctagctaagatcattgataaaagtggttatactaaatgacagattttttatgtagatgaaatagccttctatttgaagaagatgccatctaggattttcatagctagaaaggagaagtcaatgcctggcttcaaagcttcaaaggacagggtgattcttttgctagagtctaatgcagctggtgactttaagttgaagcaatgctcatttaccattctgaaaatcctagggcccttaagaattatgctaaatagacttagcctttgctctataaaagtaacaataaagcctggatgagagcacatctgtttacagcatgatttactgaatattttaagcccggggttgagaccttgtgctcagaaaaatatattttttttttcaaaaatattactgctcattaataatgtagctggtcatccaagagctcatttggagatgtacaaggagactcatgttgttttcatacctgctaatataacatccattctgtagcccatgggtcaaagagtaagttcaacatttatgtctcattatttaagaaatacatttagtaaggttatagctgctgtaaataataaatcttctgatggatatgagcaaaggaaattgaaagccttctgtaaggaattcaccattctagatgccattaataacattcatgattcatcggaggaggtcaaaatatcacatttaacaggagtttagaagaagctgatttcaaccctcatggatgactttaaggagctcaagttgtcactggaagaagtcactggagatatggtgacaatagcaagagaattaaaatgagaagtggagcctgaagatgttgctgaattcctaaaatctcataataaagcgtgaatggatgaggaattgcatctgatggatgagcaaagaaagtgctttcttgagataaaatttacttctggtgaagatgctgagaacattgttgagatgacaacaaaggatttagaatattacacatacttagctgataaagtagtggcagaatttgagaagactgactccaattttgaaagaagttctactgtgagtaaagtgctatcaaacagcagcacatgctacaaagaaatgttttgtgaaagaaagagtcaattgatgcagcaaaattcattgttgtcttattttacaaagttgtcacagtcactcccaccttcagcaaccccaccctgatcaatcagcagccatccacattgaggcaagagcctccactagcaaaaagattacaactcactaaaggctcagatgattgctagcttttttagcaataaattatgtttttgttaaggtatgtacattttttaacataatgctttgcacacttaggctacaaaataatgtaaatataacttttatatacactgggaaaccgaataattcatgtgactcactttattttggtgatctggaactgaacctgcagtatctccaaggtatacctgtacatattcattcaacttttaccctctaacccgcttacttctgtccctgtggctattgctccaacatcatgataaaaacaaaacatcacatagaagtatggcaattgtactaaacgtattgtaccattggcatttggtgtctgtcgtaccatcacaattgagcctcatccttctttgttaacgcttaattcagagaaaattttcattgagattttataaatgagtaatatggctctgattattgccctgtctgactgcttttatctctatacaatattgtgagagttgctaaagagacttctgatgctgccatatatgtaattggatatttttaaattccatacagtcatctaactgacctctcacccactcaccaaaaattacaactcactccatttgcataaagtaaactgtggaaatatatatattttacctttttcaatctaaattattgctcatggagagtctatttcaccacaaacaatgctatatccttaccttaatggagtattacaatgtaattagccatggaaatggaaaaaatgaaagaaactgttatgaacacatcttcccttttaagccaacttgtcagattttgatagaagaaaaactttcaaagtcttcttacgtgagtcaggtcccattttcttatatttgcattctgctagatttacatctgtctatgacgatgatagtaaaggtgataatgatgataaaggttatgcttatgataattcctcataatgggtaactgtaatatcagataatacacgataagatctttaaaagaaagatgacaagtgaatctcataggagttcagagcatggtgaggatggccctgatttttcatttctgtctctctagtgcattttcatacacactcatcatgggggaggagggcactcaactcaattcagtttatgggatttcatcccagatttctaaatacattatacttatgactctgttcattatcccacccctcccttctctgattatggatgtagtgatgctgattatttttatattcttcactatgaaataactatcattcttcatccatttgggcttctataaaaaaaaataaataataaactgggtggcgtaaactaaaaaaataataaactgggtggcgtagaaacaacagagattcattgctcaaagttctggaggctgggaagtccaagatcaagatgaaggcacactctgtgcctgatgacagaccgtttcctagctactagatggtaccttgttgctgtgtccttatatgatgaagaggcgagctggctctctagggtctcttttataagggtactaatcccaaacaagaaggctctgtactcataacctaatcacaacctaaagacctcaccccctaataccaacctcttggggattagctttcaacatttaaattttggaggaacacaaatattcatactatagcaacattgcaagcaaaattagaataatgtattagtactgttgtgtgggatataacatgagcatgttaagaagagaatcactggattttggaatgtggtaaggccaattatctaattctcaggggaaaatactcagtaagactgaggaagtaggccaggcaaggtgactcatgcctgtaaccccagcactttgggaggctgaggcaggtggatcatttgaggtcaggagttcgagaccagcttggccaacatggtgaaaccctgtctctactaagaaatacaaacaaacaaaaaaaaaattttgctgggcatggtggcacactttagggtggctgaggctggagaatcactcgaacctgggaggtgggggttgcagtgagcggaaatggtgtcactgcacttcaccctgggtgacagagcaagactctgtctcgaaaaaaaaaaaaaatacactgagtaattaaatgtgtaaacatcattttaaaaaaacttttaaaactagtttttaaacttttaatactttaaaattttaaatcatctaatcgaacatgtatataaagatcaaaacaaattaattgtttcagtagaacagtggtgcctagagaactttatttctctggacccaattattcttaactcatcaaatcatatatatatctgtttattcatacgccactccatatatacctaagatagatacatagattgaatcatatgaatttgctgatattggtccattttgaccaaaaaatgataagtttttaggattcaaactaatagctctattactgtattgattaagtggagtgataaggtaccagtgcaatatgttatcactccacttaatcagcacagtaagcccaagaaacataaaacataaagaatattttagaaaatgatgatgatgatttcattttatcaaagctatatgctcctttactgaaatcagacaagggaaaatgttcccttctgtagaaactttattaatcccttatgatcttaatactgttaataatggactagactgtaaaggattaggtaactgaggtgttcaatatggatacttgttttatgtttaatcaaatttatctgactctaaataaatttggctgaaactagacagattccttttctattgagacagtgggctctattaagcactatgtctgcataggaaacattacaattaattttgcagtgacaatatgctttttaactaacagactaatggaaggaggactgatgtaaagcataattctcaaaaagaggggggtaaaaccttggtttctactacaattattcattttatagtattgtttgataacacatactttattaaattgtagatgcattgtaagtttttatagtatatgggaatctaaataaaaggagttatttggttgttatgccatatttagcataaatattaccatccatgtatgttgttgacttaaaacactgttattttctaaaatgtaagcatagaaaaagaataaaattcttagttgatattgcagaaatatattgtagtgtttgcagcatgaaaaggttttatatataataatatacacttaataattaatttccaaaggctgcctgtggtcagccttctttgaaagcatggattctggcaaatgagcaatataatctctttaagaccatttaagctcttaatctcttcaaaccagtaccaaagtctgttcattttgttgtaatagttattgtgtattgtttctttttaattgtgtaagtgagattcaacatcacttgtcagataagaaaaaaaaccttcaaaataaacgttaatttttcccattattgctagaaggaacttggcgtttgaaattttagatattcttaaaatttctttttaaaaatttagaattaaaaacacaaaaagaaaaaagaaaaaaatagcatttactattattccccaaaaatgaaatagtaagatattaacaatatatatatgagatatatatcctgaaaattacaaaatgctgataaaagaaatcaagacctaaataatttcagggatatattgcattcatggattggaagactcagcatagtaaagatgtcaattcttcccaaatcgatctatagatttcatgactgaaaacgattaatgtgggaggaattgctctactcaacatgaagaccttagtatatagctacagtaatgaagacaatgtgatattggtggtgagacagaaacatggagcaatgtaataaaatacagaacccagaaatagaaggaaattattatgccaaactgattctttgcaaaggtgtaaaagcaattcaatgaaggaaactatcattttcaacaaatgatgctagggtatttggatacacataggcagagaaataaacttgacctgaacacctcatactttattcaaacattaactcaaaatagatcatggatactaatataaaacctaacgcttatagatttttcatatatgtatgtgtgtgtgtatgtatacctggattatttccatctatgggtatatatgatttattcctgcctttcctttaaacccaatataattgagaattagtgcaggggtttttcatctttcctagttcaattttacattaataatctttatccctttaaagatattgatattgaattgttggagtttggttttcagaacagatgttttacagtctctggtagctaattgagttttcccattcccttgattacttcttgtactcttagatgaaagttgagtatgtttttcagtgtttattgctaggaaatagttgattacagagtcatttactagataacaaacatggaaagtaatatgacaggtttttgcttttaattgtgcttttaatttttattctacatataggaaagggtagttttcaagaggtatattgcaaaacatttgataaaaatctcttaagaaaactgaatcttgactcaataaaggaacatatgtttccaagcttttttgacaatattaaaaaaaaaactagtcctctggtcaaataaattgaagaagtttctacacaagagtcatgtattttatgtactgttgtaggcatagtaatgatcccccaaagacatacatgttctaatcttaggaagctatgaatatgttgccttatatggcgaaatttaggagtcctcaagtctactctcaggttcaattattccttaggaggactcatataattcttaaaagcagttacactcatgattacagtttattacaacaaaaagataaagactgaagtgaacaaagaaaaaagttgcatacaaccgggttcaggaaagaccaggtgccaccttccagttttcctctcctcatgaagtcatctggacagcatttaattatcccaacagtgatgtgtgacaacacacacatcgtattgccaacgaaaagttgcctaagtcttggtgtctagaattgtattggagtttgtagtaggcatggaacactcacatggctgactttagtcatctccagcctctccagagttcaaactgatacagtgtaacctaaaagctgcaccatacattattaaaataaactatctggtattgcccagaagccagtcaagagccagatatttctttggaatgtacagagtttgaacaacccagtcccgttaagttaatattttaccataaaaaggcaaagtttactttgcagatttgattaaattagggactttgagatggtaagattatcctggattatgtggatggaaccaattaaaaataagcacaaacacacaaagatccttcaaggtggctaggtgcggtggctcatgcctgtaatcccagcactttgggaggctgaggcgggtggatcacctgaggtcaggagttcaagaccagcttggccaacatggtgaaaccccttctctactacaaaatacaaaattagccaggcatggtggtgcatgcctgtaatcccagctacttgggaggctgaggcaggagaattgcttgaacccaggaggcggaagttgtagtgagccaagatcacgccattgcactccagcctgggcaacaagagtgaaactccgtatcaaaaaaaaggaagaaaaaaatccttcaaggagtcaaaggagatgttggaatgaaaagcagtgtgtcagagtaatgtgatgtagactggaagatgctatactgcttgctttgaaaatggaggaaaggggccatgaatcaaggaatgtaggcagcctctagaagctaggaaatggattctcccctagagtctccagaatgaacagcgccccattgacaccttggttttagtccagaactctaagaaagataaaaaaaaaaaaaaaaacaaaaaaaaaacaggctgggcacagtggatcacgcatgtaatcccaacactttgcgaggccaaggtggacggatcacatgaggtcaggagtttgagacctgcctggccaaaatggtaaaagcccatctctactaaaaatacaaaaatttgcttggggtggtgatgcacgcctgtagtcccagcgacttgggaagctgaggcatcagaattgcttgggcctgggagatagaggttgcagtgagccgagatcgtgccaccacactccagcctgggcgacagagtgactgagactctgtctcaaaaaaataaaagataaaaaatatatgtacatttaaatcactaagttcatggtaatttattatatgagcaataggaaactagtagagtttaatataattattatgtctatgtttgtgtagatatatacataaatgggggttgtgtgtgtgtgtgtgtgcgtgtgtaatgtcaaagcaaactttccaaatgcttacttcttgtacatcttaacctcaaggcacacaaacacacactcagttgcataaatgcacattctcacattacacacacacacacacacatatatatgacatactacattctgttctagcttcctttaatgacagctcacaaatatgtgagtagaatacactgggtttgacttgggattatgaaattcatggtaaacatcatcaaggcagatggatatctaggtgtttgattatattgatgaacaggttttggtatacaaagtgacacttgttattaaaattttgatttcatacctatttcaaactaaattgcacctacagtccctttgcaagctccactttttagaaattcagctttgtattcactgcatttatgacattcctttgcattttttttttttttacatccacttcgcttaacaagaagacactgaagttctaagtagcactgtataggactgaattattaatacagttcttcagttggtaacaagaatgctcttggaaatatcttgtacatttgtcttctcctggttacttagtagattgagcatgtaaaaaaatcttttgcttaaaattgcagtacatcttaactgacaatacttcttaaccatagtgcctgacaaaacctggatattataatctcgacgtacaatttggtccagcagttgatctctgctcagatcattcaaaagggcaattagagaaagtcaacaatacacatgtctgtaatttagttttctgtacaaacaccataaccaaatgggatgaaaggatttaaccatttgcaactaaaaacagtatagtgctttataaaaagggcctaatcaagcagtatattgattgaaactttgtacagatggttctcattattcacacattctgtgtttgggagttctcaaaacttgctaaatttaatttgtatccctaaaatcaatgctcatagcattttcacagccatttgtgtgtatgcatagagtggtgaaaaatttaagtcacccaccacacatgttcccagctgagatcaaaaaaggaacactctgcattcttgcttcaggtctcatacggtaaacaagtgtcctttcagcggtgtatttaatgctatgtttttcatatttttatgctttttcttggtgattttgctgctttaaatggccccaagcatgatggtgaatttctgtctagtgttcctaagcttaagaaggctgtgaagtaccttagaaagaaaataggttccttaggtaagtttccttcaggcttgagttacagtgctgttggctgtgtattgaatgttaatggatcaataatatatattcaataagatgtttttaaacagaaaaacaggcaaaatgggattatacattgctggttcacaaaaatgttatgagcagaggctcccagaaatctatcattgtatttctcctgggaggaatgcttcagtattcactaattcagtgttcacagtgactttatagaaacacagtgaataacaagacttgactgcacattgtcatccttcatccaacccacttgcatagtgtagggtctacactttccaacagtactaaaaacccagaacgacattcaagttatgcaggtgtattatttagctgtatttgggttctaagacatgagtaaagttatatatttgtacagctcccaactatatacagttgtccctcagcatgcacgtggtattggttccagtactctcatgtataccaaaatctgaacatactcacatttcacagccaactctgcagaacccgcacacaggcaaaattggccctctatatacgtaggtttcacattctgcgaatactgtatttttgatctgagtctggttgaaaaaaatggcatgtaagtggacccatgcagttcaaacccgtgttttctcaggactcaactatgttatttatccttttacttttttattccttttttattcctgtgtataaaaaattgtaccaccagtacaaggaatgtcatgaaattgaaatgacaccattctgtgtttcttaaataaatgtcatacaggttctatgaagaataaattctcttgctaaaaaaaaaaacttgctatttttcatcatttgattttctcatattaacatttttcatcttaaatagtctttctctttactatttcccttcacatttcttgaaaattctttttcttgcccatctgttttgtatctccttattattttctttctgtttttattatgctagccatggtaatgataaaatctccgacttccaactccctgcaccatttggcacttggcaaatggcttttttatgtatttatatttttgttatttatatgtctatatcctaaacagaaccctacgcataagagcaggtggccagtaactaatggcattgataaaatagagccctttacctctattttcttgaaatatgctttcaagaaattccttgtactagatcatcgtgtatcataacattatgaacacagcagcaaaaaacaagaaaaaaattcagactttagtattcgtaagtaatgtcaatacaatatttggtttaacagacatacgatcattttgtttgctatttcaccatattattttttatgtaaataaggtagattatttccaaagtctttctgaatttactaaaatctcattttacatgaccctactttagtaccttaactaccaccctcctaggaatatatctgtggtaagaacagacaggtgtatatatattatagataagtgtctgtctgtgtgtatgcatacatatgtgtgtatctatatattaaagtatgtatatgcaatatgaaggtatgtatatatgcatatatatgcatgaattatattaagcatatgtatatatatattatagttaagtgtgtgtatgtgtgtatgcatacatatgtgtatctatatattaaagtaggtatatacagtatgaagtatgtatgtatatatgcatatatatgcatgaattatattaagtatatgtatatgtgttagatatttatgtatatatgtatatttataaaattatgaagttctacattgaactgggatataaagtccatgatatctttacataacttagaacagcaaaactctcgattcattcttgttttcaaaatccctttagcttcattttctctggtgcatgaaacaacataaaaatccctcttcttgccattaatctcttcaaatcccatgccagatattgtcaacattacagctataaaaattttagaatgttttagggacatcttgagatctttaaattaaaatatccactaaattaacatcataagcctagactcgtaatctttatttttgatctgactttctgtggcttgcaaatttagaatcaggaaatgaaacaatactcaatttttgcagaattagggcttacttatgatgcaaggctaatatggataatttcttaattgactgtatctgctaagacaaaatcaggaaatgacttaattaaaatgaataatttaggtgatattctctatattgtaatccaaattttaaagaagcgaacttctcttagaagaaaaatatacatttaataattggttcaatgttattatagaccttttgtgttctttcagaacataataatggttgctaattttctgggcagaatctcttgataagagagttaaattgactcagattatctgcaacccactggactattgtggtaatggcagatattttttaaatttaattcattgatataaaatatttagtcttttataataagcaattaaacctttgtacttaagccacttcaacaaaaatattacaaaaccattaggcagctacaataggctccatgcatttttaagtacggtttatacagaataaattatttctgtattggaatatcttcttaataatattgatgtttcaagaaaacatccaagctattttataagttatttgaatggagactgaattatatagtagttttttgttgttgttattttaattcatacaccttttcagtagaaaaaggtgccttggttttaactttgttaccccacaagcacagatattaatttttattgcattcttcactaaagtacatcttgcatttgattttcagacatggataagaccatgatagctaatgaatgactaaaataaatcaatactccaaatacttctatgcttcatttttgatggaagtatgagtaagggatacaagctgaaggcctcctatatatagtacttctacattactttttttgttataattttgtaataataatataatcacaccacatacttgtaataaaaatataatattcatctaggctaattggtcaggtcctgaagtaaatatatctcttcacaaaaggccaatgagtgacccacctactggtagattttatgcaaatggttgcatcttgtacacctttattattttttaagtatatttgtttcctacttgtaacctattctaaaataaaaagtttactatctctttgcagtaaaaataaatatcacatatctatatatataaagatagatatggtatacacctcagtatagatataaagctctttatttatttatttgttcatttatttatttatatttatgtttaaatacagacagatttccagattttaaaatgcatttcttctcactgaatattaagggacttaaaccatatactcaatttgtcaaagctgactggggaatataaagaaagggctagatatgtaatatgtgttgctaatattaactagaatcattattttgaagtacagatcttagttcaataacatagcgcgctagagcagaccaaagttattaacttcaattgataaagaattatgaatataattataatcctgttaattatttaacaccgtgaattatgcaaatgcagcaggtattattaatcatctgcaggaaccagaacaatttccctaaaagaacatataaatattaaaaagtctgacttggctctgttatgtactgttagagctttagtgttcccatatgaacactgtttggattcaattatcctttataacatgaaaaatgccccgaatgcatcctctccaaaggccaaatgaatgtcattagagttctccttttgtctataaaatgtttactgactgtgtggtctcgcatgtttgtttatatcaaaatatctttcatcctattaggctaatactggtctgtggcggctggcatcctacttgctaatagcacgttgtgtggatatccttgctgtgagactaagctacatgtgatagtcttgcagtatctaaaaaaattcccaaaattaacatatgttgaaccttccctcaatactaaggaacaacagagcattcaatggagtaattttaactaatttcctaagtatgctcaccctttacagaaaggaaaaaaagaaaaagaaaaggaattccaaattggacctttggaaaacactcaattggggagaggaattggtaaggggcttgaagatctagtttggttaacagattgttgtaaattttcctgaaggaaatattagccctttcctttaaagagttatttgtggaaacctttaaaaaggattttcaaaataaagactgtttgcctcaatatattggagtttaattcctatccatttttactttatttaaagttagacgattaattgattctcagaaaaattatttgttttaaaaggaagaattatttatttcgaaatctcaaaatatttccaaataccactgtgattcttggaatgcaatctttcttgggaaaatgccaaagttgggcaaagactggggtaggagttaggagagcaggcaaggacatgtaggaaggaaggcaaactagggaactattgtgtttttgaatcttttaaactcttagcctttagaacaatgtctggcatagagacttccaaaaagaatggttcaattcaatgtcataagtagcttgtcatttatggcacattcacaataaatgacagtataaatcaactgcgcattggtagacataccagagtcatgactatttcaacattcattttatccatgtgtttccaagtatgataatagctgaacattacgtggtactcaatgaaatttagatttatgtttatgcctcacatcttagcaattatatttgaaaaactggtgtctgtacagaatgttacagtttaaaaaggattttggatgagtaacttttgaaggaggtaggatttggggactctaaaatatttttcttcttatttttattgaatttctgcctgtgactgctttctaccctaacaatagaggcgctgcttactgtgctgcctgctgtatctcactggaaccattagtacttacaatgggcctttctgatctttatttctatatatttatattttttctgagatggagtctcgctctgtcacccaggccggagtgcagtggcgcatggctcactgtaacttctgcctcccgggttcaagtgattctcctgcctcagcctcccaagtagctgggactacaggcgtatgccacgacacccagctaattttttgtatttttagtagagacggggtttcactgtgttagccaggatggtctcgaactcctgacctcaggtgatccgcccgccttggcctcccaaagttctgggattacaggcgtgagccaccgtgcccagcctctgatcttttactctttctaaggatgactcgtgagtgaaatgtcaaactcttttatttatttatttatttttacaaaattaaaaaagatataatctgggaaaaatataacatctgaatttttattatatgtaagtctattaggtggaaggtagaaatagggccagccagtagaaattgaattctttgcatgaaggagagcaaatttaggtgtaatataagaaagaactttctaatagctaaatctgtctcgagttgcaatgatcatgcattcttctctcctcttttatttttggccactgctggatttcagggatcatcatctggactctctctgctccaatacatacttggaatctatttaatcaatgttgttattaaaaggatataattttacatactttaaaagaattttgtccaatactcctcaaaacaatccaatgagctaaatattaatatcctcattttgcagataagtaaactgaggcatagagcatgtattagtcagggtggggataaacaacttgtccaaagtcaccaactatttgagagcacattgaaacttaggcagggtagcgccatagtatcttgttgtaatatctactctatgctgcatctgtcctcagtattacagagacagagtctgggtccccatggctttgtactaattgagactttggattgtttgccccaattttcttctccagactcactttccaacatgacatttatattgctgtgatgtagccacatagaatctctcacctctcacccaaacatgccaggagttttcaagcctctgtgccatttgcctttcccctccatgtcccccacacccatcacagccctacttctaccattctatcagtggaaatctcctacttatttcctcaattaaatgttgttccctctatacatttagcaaataccaggcccatttaggtactccttcctcattttagccaaagcttcagattttcagctctactatgaccatacgttatattaaatcatgtatatttctgttccttgttataaactggaaactgcaagatcaggaaccacatcttcttcatttgtgtacctttagacttcaataagtaaatgcattaaaaatttgtctaaatgaatgatgcacatgtaacataaagcaagagtttcttttcatagtaagtattcaagcaggagctaaattgaccagccagcatcactgtggtaaagaagacaactgcatagggagaaaggttaagctggatacttgtctctatggcctttttgtagctctctcattgcaatttcatgtcatgccttacagctaaaaagtgccagtcagaaatacctatccattgtgtgtggctcaggctagttgattatgatccccaaggcctagttcttagaaaatgtgtttgtattatagtccaaaaggagctactctctgtctcctttcctcactaaattctcttttatatttttcaagtttacagaagctatatttgggcacagacttcagtaatttttcctctgtgcataaacactcaaccaggaaatatttatccctcagagacactgacaaaagatgtgttcttaagttattgctaagaactaatccttttcaccatgggaggaaaacgtaatgctctataatgtgacttatgagactgaaggttttttataacatagaatgaaatgataagagaatactcttgaatatatgtttgtagttaattacagaagtgtgcaaacaaacttctgacattagtttgttttgtctcctaaattaggtatagatttcttttttttttttttgaagttatatttggcattttttttaaattttattattattatactctaagttttagggtacatgtgcacaatgtgcaggttagttacgtatgtatacatgtgccatgctggtgtgctgcacccattaactcgtcatttagcattaggtatatctcctaatgctatccctcccccctccccccaccccacaacagtccccggagtgtgatgttccccttcctgcgtccatgtgttctcattgttcagttcccacctatgagtgagaacatgcggtgtttggttttttgtccttgcaatggtttgctgagaatgatgatttccaatttcatccatgtccctacaaaggacatgaactcatcattttttatggctgcatagtattccatggtgtatatgtgccacattttcttaatccagtctatcattgttggacatttgggttggttccaagtctttgctattgtgaatagtgccgcaatgaacatacgtgtgcatgtgtctttatagcagcatgatttatagtcctttgggtatatacccagtaatgggatggctgtgtcaaatggtatttctagttctagatccctgaggaatcgccacactgacttccacaatggttgaactagtttacagtcccgccaacagtgtaaaagtgttcctatttctccacatcctctccagcacctgttgtttcctgactttttaatgatcgccattctaactggtgtgagatggtatctcattgtggttttgatttgcatttctctgatggccagtgatgatgagcattttttcatgtgtcttttggctgcataaatgtcttcttttgagaagtgtctgttcatgtccttcgcccactttttgatggggttgtttgtttttttcttgtaaatttgtttgagttcattgtagattctggatattagccctttgtcagatgagtaggttgcgaaaattttctcccattttgtaggttgcctgttcactctgatggtagtttcttttgctgtgcagaagctctttagtttgatgagatcccatttgtcaattttggcttttgttgccattgcttttggtgttttagacatgaagtccttgcctatgcctatgtcctgaatggtaatgcctaggttttcttctagggtttttatggttttaggtctaacgtttaagtctttaatccatcttgaattaatttttgtataaggtgtgaggaagggatccagtttcagctttctccatatggctagccagttttcccagcaccatttattaaatagggaatcctttccccattgcttgtttttctcaggtttgtcaaagatcagatagttgtagatatgcagcattatttctgagggctctgttctgttccattgatctgtatctctgttttggtaccagtaccatgctgttttggttactgtagccttgtagtatagtttagatttctaattgttggagagagaatctgtttacatattggtgaccgttacaagcaaatctaaaatataacatcattttacatcatatattaaattatattaaaattcattaataaatttgaaaggaattaattcatatttataataaataacttcagaagattcactgatttaatggaaaaatttgttgataaaattatattaagagaggaaacaaaagacattaaataaatttgaaatgataaatattcagacatttaaaaaattaagtgtattagttcattctcacactgctataaagaaatacccaataatgcataattcataaaggaaagaggtttaattgactcacagttcagcctggctggggaggcctcaggaaacttacaatcatggcagaaggggaagcaaacacatcctcatcacatggcggcagcaaggagaagaatgagagccaagcaaagggggaagtcccttataaaaccatcagatctcatgagaacttacttgctatcacaagaatagcatggggaaaccacccccatgattcagttatctcccactgggtctctcccaccacacagggggattatgggaactacaagatgaaatttgggtggggacacagacaaaccatatcagtaagtatctacataatccatttgtaattcttcccatcccatattcctattacccaggatttgtgtaatctaggagacataaaacttctgaatttgtattatatgtaagtctcttcggtggaaagaagaatgttggctttattttatcattttaatcttagaagattttaaaaccataattcttaactgaaactaagcttattttggcttgttatatataccacataacttaaaattttaaaatgtaaaataccaaaggagttgaaaattatgtccacacaaaaccctgcacatggatgtttatgacagctttattcatcattgccaaaatttggaagcaaccaagatgtccttcagtaggtgaatggataaataagatgtagaacattcagacaataagatgttattcattgctaaaaagaaatgagctactgagccatgaaaaacacatagaggaaaccagtgaacaagcaaatctgaaaaaatctacatactatatgatttcaacaatacgacattctgggaaagcaaaaactatgtagacagttaaaagatcagtgttttccaggggctgtgagggaaatgtatgaatacgtagagtccagaggaattttaggacagggaaattctctgtaatgatgctataattgtgaatacatttcattatatatttgtccaaatccatagaatgcacaacacccaagaatgaacctttactcttaactatggaattttggtgataatgatttgtcaatataggttcatcaattgtaacaaatgtacccgtctggtgggagatgtagatagcgtgggtggctgtacgtgtgtggaggcaggggatatatgagaaatctctgtaccttcctctcaattttgctgtgacgctaatactactctagaaaaattaagttctttaaaaaatgtgcaacactactaataccactatagaaaaatggaaagagtaaagagaacaaatagcttaccgcaaaagaaatataaatgcccaagaaatatgaagatatgctcacggaattagtagaataactaaatcagtagtttttaattttaaatttatttttatgtaaattttacctatcaacctagaaatggtgaatacagtagaagagtcagtgaagtgggcatgccctttcttgttggtgaggttataaatcagtctaatggtttttgaaagcattttggcaatatgcataaagagtgtatttgaccctatgacccagcaatttgtcttctgagactcttccctaaagacatgattaaatagtatggacaaggttattctttgctatgttacttttaagaaaagtggaaatgaccagcaacctaagtagctgaaaaataagggtcagataaacaaatcttggcatatctgttgcaacggaacattaagcacttattaaaattatgttttcaagaatatttagtaagatgaataaaaattgatcacattataaaaatatatagccaatatgtttaatactatgaaatatgtgtgtagaaaaatgaatattaaaataaaatttttcaaaatattaaaacttaatatcttacatgatgaaatgtgtcatgtatgtattttatcttacaaactgctatgatctgaatgtgtcctacataattcatatgttgaaacttaattgccaatatgatagtactaaaaggtggaggacattaggaggtgattaaatcatgagggcagagccctaatgaatgggattaatgaccttataaaaaggctggtgagaaccgagaactaactaggctcttatatttttccatcacttccactatgggaggacacagcatcccttctctctggaggatgcaacgttcaaggcatcatcttcgaagcagagactgggtcctcaccagacacctcaccagcctacagaactgcgaacaattaatttctgttgtttataaattacctgtctcagatattttgttataatggcgccagtggactaagacacaaatattttcttacaacaaagggaaaaaacttactgcataattttgtaaaatcgaattggaatgagatacactgtgttcacaattttaaaaagtttcacaagggcataagatcattatgcttggcatgtcttccttaaaaaaaaatataccatgaagtataatttctaagcattatgtagagagccacctatttctgtctgtttggagtgggcagggtatccacacactattttgaagaggtgcttgcaaaattgagatggaaaaatgtgtacgtacagttcctaaggccttacctggagagtgaattgccctggtttttacaggtaataccacttggaaggaaactcatgcttctccctaaatcagacaatgcctggccttgagtggtgtcagggtcctggtgataatggttattttaacctcctgcttttctacttctagcatattctgcctttggcttcatgcaaaatactgaaggacagcgagtgcatggatactgctttatcgaaccttgttaattggtctctttgctataagaaatacattgtccctgaagccacaatactaacgcgactggttctacatcttaaaaaatctttgatattttacactgtgtctgttacatggctattatgtttaaactcccttgattagattatagaagtttacattggggaagagtatgtaaaagagacagcaattactgccaaaatcttccccaaatcagtgtcttagtccttttagactggtgtaacaaaaataccataaacagggtggcttataaagaacagaaatttatttctcccagttatggaggcggggaagttcaaggtcaaggtgcaggcacgctcactgagcttccaaggcctcttgggcctctcttataagggcattaatcccattcatgaaggtagagccctcatgacccaataaattcccaaaggcactaccttataatatagtcatcttggtgattagaattcaacatatgaagtttgagaagacacaaacaatcacagtatggcatccaaacattacaaagagttatagtttgtctccacagttagcttagtattaaattttcctcatcagcaagataggaaaaggttagttgaggatgaaccagaagttttcacctgatcatattgacatgggtgcctgataatctcatgcctttatgggaattatatgttcttcattaaaaacaaagaattctggcctttgccaatgatggctttaaactagtacaagcattctgggtgtggctgtggtatttgatcaaagctaatatttgctaatttgcatgttcaatgcaacaatcataaaatactggatagtttcaggtctagtttatgcaccacaaaaaagcaatgataaaactcattcatcttcactttaaagtcgttgtgaagtggctgtttccactgggaatatataggtagcatgtaaaacagttgtcttttctggtaaaggggtttcttgctaaggcgtgaccacaaccaagtgattctttctcttttgattagtattcattgtctcttctgagctgtctctagtggatacagtttagaaatttaacataaagaaagaaagagctctcacactgtaggatttgcagcatgctatttaagtgcaactgctaccacagttaaaggatcatcggaaacatcaaggtgaatgggaaagtggagagagtcaaaattcaagaagagacttttatattattaaaatttattcaaactgtaattgtaaaaatggcatggaggaaaagttaaagtcgaaaatatcagcagtatgtaaaaaaggacaatgtaaaacatctaccaattgtcagaatggctagaaaaacatattccattattcagccaaatattcttgcctttacctctccctgttctttacctgtccacccctagactgtatctttcttgcatatttcattttaagattcttgcacataatttagagaactgaagcaactacctagcccatctttcctcactaggccttccttagaatctgcacggagtcaagtttatggcccctttgaaaagctgcagctccttaccaaagttttttcaaatagaagctaagaagggaaggagtaaaagacagcatttgtataaacattagctcatgtaatcactataaccacctatttaaggtagatgatattaatttcattttcctgaggaaacttactgccattcagatcaaaagtcttctgcaaagtcctacaagtaccaaaagaaaaagtcagggtttttacctatatctctctaactctgattatgtcatttttcttttctctcattttggttttcaactatagagtaacataataaccacttactctcaggaaaaaaaaattagaataaaaatttgcagaccttgcttataaagatttaattacatttaaaataaatagagaaaatatttggaaagtttatttttaataatgatgagtttcatttaagttatgtattctctgtacctattatgaaatatattctgtgaagttgtggttatctgatacaggtggaggtggtagacattaagactcttgatagctgttccgcttctgtcccctttctggtacgtggaatcacttccgcactcacttgaagttgagtctggctgtgtgacatgccggatcaatgaaatgtgcgaagaagtgaactgtgtcacttttggacagatgttctaagagccattgaatgttttactgtgttctgttttctctcagacctatcaaccaacaacactcaaaagttggctgctttatcttcctgagaccaacaacactcaaaatgttggctgttttatcttcctgagtgattacagtatgtagccatcccctgcttattaggataggcacagagtatcagcaagaaataagatactaagagaatagaatttgttattactaaagattttcctaaagtgtccgatacgctcaacattgacgattgttttgcagccaaaacagcaaacatatttaagaaatgtgtttaagaatcacatattgaatctgtgattcacatttgttgtgatggtaaaatatttgtgtagttttctccttttttcagcttctattttaaataacataaattgtttgaaattttgttaatggttcttgaaattaaagacgttcagcaatgatatggtcttaatagaaggaaattgttttccatcactgaagattaattaaattttgagtaagaattgagatatgtgcggctaacacagggaattatctctgtgtttctggatgaaatgggattattaaaacatgaaggaactattttcctcttacggtaagagaacagtaacttaatagtgaaaatcagttgatcatcacatgcttgtggctaaatatcagtttgtcctttttgtagctgctgtaatgatatgttattgaaatcatttagggatacttttttgttgttaatttttatggaggtattattgagaaataaaaacattctatatatttaagatatacaacacggtattttgatataattaacatatccatcaccgggcatagtagtctcttttttttgtgatgagaacacttatgatctactccctcagcaagtttcaagtataaaggacattaatattaactacagttaccatgctgtacgttagatctctataactgaaggttcctactctctgaccaacaactccccatttataccactcctggcaaccgctattctactccctacttctataagttcaacattttatattccacacataatatcatgcaacatttgtctttcatttttttctgcccttatttcacatagcatatgtcctccaagttcaccttgttgcaaatcgcaagatttccttctttttatggctgaataatatttcattgtatacataccataatttctttattcatccatacatccacaaacacaggttgtggctatatcttggctattgtgaataatgcagcaataaatgtcagagtacagatatatttttgagatactaatttcatgttcttcaggtaaataatcaacagtgaaattgctagatctcatggtaattctatttttaatagtttgagaaacctccctactattttttttgtaatggctgtaccaatttacattcccacaaacagtgcatgagggtttccttttctccaaatcctcaccaacacgtatttttaaagatacaatgagacaaactttttatttaaaattatagaacaagaatgaatattaccaattcatcaaaaaaaaagtctgtctactatcaaagtctatttttaaactttatgttcttttacttaaatatttttggaaaaaaagataattatgtacactaatgtgtgtgtgtacattcacaatttggcatatactattaatttggtttaaatttaatttggacataataattcttaaaacttgtcagactgcttgataagtaggtattagtgtatcccacctcatctacagagatgaaaactacagcgtaagttatctaaaacagtaagtgtattggatctcaggaagtatcacttcagaggtgttattcttaacaataacactattcagcaaatgctgcaagaataaaatcattaaaataattttctaaacatcaaataagccaaagtgaatgtaagcttttgtgaataagtttagattcagttaaatttctcaaggatcagctaaattttttaatcaaaaatttcaaccaggtactaaaactattttttgtgtcttcctttgacatatgggctatgtatatgttatataaaaccaaataatgggatatttctgattattatacatttgaaacatatcattgtgtctagcttcataacgtagctatcatattttggtaagttaaattgtatgtcaaatgggtgctcagtctggaagactcaaaaactagaatttttcttttttctaaaatttagtaataattgacaaataaaagcatctggtaccattatacttcctacagtctatattctcctatcatgataaaactggaattcatattatattgaaaaacctcttatttttttcttttttcttctttaactacatcctacagtgtaccctagaagacataaattcaaaaatgtgaatagttctgagaggttttcttgggattttaccttttatgaaactgctataatttatagaatctgcttgtgctctgtcacctaaatttaaaaagctgccttttattatttattttttagtttgctccattcagacagtgatgtttcatgtgggagacatcaccacaatggattactttaacttggaataaccttgctttaataattatatggaatacctttcacaagagaaagcattactaggagaaaagccaataaagctatgaaagacatggataaaagtcaacagctgattggatatagaatctaaataatgtgatatgatttaacttacctggatctcataggtaaaatgaagaaatgatagttacatatcagaattcatatagaatatatgtgagataatgcaaataaatattttagtatcatatttgtcacaaaatagtttgtcatcacatattagctcatcccccatggatgtctcttgtcatacggttgatagaattctgtgtccatttgtgtaattttagctccctaaggatagccactatttgtcactcactgttttatctagatagcacagaaactgatagggagtagtcaataactcagtaaatgtttggccagtgaatggatttacaacatccctgtggaaataatggtagatgtgggtctgtttattgcacaccgcaattgtcaggatgtttattgcataaccagttgtcactggttagtctctgtgtttgtttctgaatttgtttagaacaaggctttatttttactaaaaatataacttgagttgctgacgaattttcagtttttactcatttaccttgctgatatagctagctgaatttacatatctatgtcactatttgtatttatctttatctccatatatttatattatatatacttatgtctgtatctctctatatatgtctctttggggatgtgtactgtgtaggtatattttaaccaccagctcagtgagaaagaactcaagctatgattcttagtgtttgcttatttctgtggtgtaaatacttcaaccacatccagtttcaagctatcaacatgatgttgctgagtgtggagctgggatgagataggtagtggccaattattatatagcattttcaccatacagataaaaggatacaaataacctcacaagtgtagacgacagtgaaatgtagtaaaataattaagaagtgatgagttttgaacatttattacagttgctttaatataatttatttaatcataagtttatttaattttaacaagggctatgtttaatagtatgccctcaaaattccttaagatttagcattcagctttcacaatccatagtaaatctttaatttcaaagtctctgttgcttttcattgtaaaactaaacgtaatccatgctttaactcttttctggttgttttcatatgtcctttaaattctcgatgttttgtatgtttctacagtgaatatttgtgagttgaaactttttaaataattcaagaatatacttttgtgtgtgactttgaaattgtatatactgcttgtatgatttctataatctattgccaagggtaataagagctagtcttaaaatcaaaaaggcactatattactctttgattcccttttttttttctcttaatgaagctgaaataactgggcactgaagataaaatatatgttaactagaagagtatttgctataaaataaaaaatttgacacattttggcaaaagttttttttttcggtagtaaacattttactacctagtatcaaatatattaaacttaataaatataagaaaacagagcctacaaatgcaaagtctaaatcctaatttttacctgcaattgttacttatatgagttcatttttctaaattaaaactaaatcaatctactctacctcctattcatggcctctgccactgcagtcctgaaggttggggtgaagatactcacattttacaagtttgtgaaatattaactaaaaaactatggcgaaatataaacatgaacattttggagagaaacacttctgaaatggtagtgtgtagtgtcaggggctccatggatgctgtcccgagtaaaacaactgtaactggtgaaaattgtaataaaataaccatggaaagtctctggaaatggtcttaagagcatatagcaaatggagaaatatttattcaaaacaaaaaaacctgcaaaatctcagtcagaacagtgaaagttaatgacatttgagcaacaatccccaccccaaccccactctctctagctctgtgtgacagaaactttactctggatagacatggccaaaaacagggtgcttcttctacgtgattctcttcttctttttacttatcagcagaagctgctgtggcttatcaccacgtctggtcatagctgaagagatgtggctgcttctgtatctcctgagctaccacacctagcgcagatccttcctctcataaatgagggagaggctaagaccatgaaaatgagaaagaatcatcttttaaacaaacggtgctgagaaaacttgagattcacatgcagaagaatgaagttgaccctttacctcttggtgaggaagaatataaaacgtttgggcagttatctaccttttggacacatacttaatattagctacactatgaattattggtttggggtgagttagtgagaaacgggttccttttatatgtttagcctagaggcaggtatcgagagagggcttaaatgaacatcctacaataaagtttaaatttttcatcctccattgcagctaggtatgatcatgtgacctggttctgataggacataataagaattaatgtgtgaaacttctaggaagagaagtccatcttcccctatcttccttgttatttctcactgttacttggatggcaatgtgatgattggagcttgaatagccatctggactacaaaatggaagttgtatgttgaagaagacaaactaataatataaattgtccaatgtccctgatgatcatggagccactgtactgcctctcaactgtctcttcttatttcagaaagatgcaaacttccattgttcctgatattggttattttggattttctgtcacttgtagctcagttctaatctcaatgaatgcaagagtcactgacaacctgctatagccaaggtactatattaggcactgacaggtctagggtgaaaaagagacatcgcctggttttcacagagcatacttactagtgagaaaagataaaaatcaaatatttaaagaatatgattttgagggataatcacataacctatagtgagtgaatctggatttaagggcttctcaattcaaagaaaagggaaggccactatgaagcagtgatagctgagctgatacatgagataatagacagacctatacatgtgatgatctggataacagaattctatatagggaaacaggaagcacaaagggaggaatggactaaaaaaagagaagcagaaaaattgacttgtgtggttggagtagagagggcaatggtaagagcaacaatgggagatgaggttagaaaatagagtaggagtcaaatgaaacagggtttaataggtgagggataaaagcaaaaccaaaaatatatacttcagaatcttgtcctggcatctgtttttcctccaatcatctcctcctttgtatattttctttcttttttttcttcatctatatatcttctcatttcattcattcaatcacctatacaatgtggtccactgtctccagaatccaaaatccaggattgtatcctactatttttttgtagattttctacattcaattgtacataaaaaactggcctaggaaatccgcaccccatcgtaatttgtattacaaatttaaaaccagtagctctcaaatcaaatttggataagaatcaatgtactactttgaagatcttccgaatatgtatatctgtttataaataacatatattttaaagtgttaacttatgatctttcattgatacatttctgttttataaaacatgatattcatgatagatctattttattcatttcaacatagatattatcttcgctactcttttaaaatagttttgaggttccaacacccagaaagtgttgaggaaaatttgtatcttctaatggtactaaatataatgtaactgactttgagctgtataaaaaaatgattccaaaatgagtcctaactcttggttttaaaggtgatgtaggtgtgaagggagatgtgacaaaaccccaaagattgttacggaagttttggggaagggaatgaaaacaaacccaccgtggtaattactcctaagattgatgaaaatagaaagtcttgtgcagtattagtagtggaatacatacattcttataaatttgcttgagataatgtggacaatgtgtattaaatgttaaaattggcatatataatttgcatgaatatacaaatgggttacatcttattccctaatacaagtgtggtcaaataaattatataagatttataaaatagcaaattatgcagccatcaaattattgaattgtttcagtatataaaagtagaaacatggccagaaactattgaaaaatattacaagtgagttacaaaacaatatatgtagtaggatttttagggtaacatatatcgaagcagaatgtgggaaagatgaagacggagacacagaaaaaactgtcgtttggaaatagtcttcaaataaattgggtgtctatctcttggcaataaaattataagtatttctctttttatttatatgtagctttttccagtgaaataataattattataataaaaagactttttaattcaagacaaaataacgagaacatcagtgtgattagaaggcattacatggggataaatggcagccatgtcatctgcaaacagagacaatttgacttcctatttgaataccctttatttctttctcttgcctgattgccctggccagaacttccaatactatgttgaataggagtggtgagcgagggcatccttgtcttgtgcgggttttcaaagtgaatgcttccagcttttgcccattcactatgatattgtctgtgggtttgtcataaatagctcttattgttttaagatatactccaacaatacctagtttattaagagtttttagcatgaaggggtgttgaattttatcgaaggccttttctgcatctattgagataatcgtagtttttgtcattggtgctgtttatgtgctggattatgtttattgatttgcatgtgttgaaccagccttgcttcccagggatgaagtcgacttaatcgtggtgggtaagctttttgatgtgctgctggattcagtttgccagtattttattgaggatttttgcattgatgttcatcagggatattggcctgaaattttctttttttgttgtgtctcataattggtgggaaatacatatatgttgagaatatatccgttgtttgaaaaacatgacttttatattcaaaagttgtaatctttttatgaagatgcattttcttttttaaggatgaaggaggggtagatgtatttttaagctaggaggaaagaaattcgactttctggcagcttattttgtgaccatgtataaatcaagcaaacaaaagctttcacttatagtaaagttcacttgaagataaaaattgaccaggaattaaagacattgtatgcacttgtctagtttatattacttgagggtggtggtaagatgttttctggcttgtatagcatgcatgtattaaagacctgagacataaagaagcaagtatatttgaggaactaaagtcaagcacagctagaatgaggaaagatgaatgaatcaacatgggttgggggagatatgtaaacagggattacctcatgcagcatcctatagttcgtgtttagcattctggattttataaccaaaaaaataaggagccgcttatgagatttagtcaaacggaataacatcatcatctttatctttttaaagctcattgtgagttcatgtggcagagagactttattgggaatagaggtacttatatagggattggaggatcaacaggctgaggaaagatgaaagaccagtaggaggtcgtagtacttataaagtcataagtgtaatatgattttgattagaatagtaacaatagacactgtttaaaaacactttttagtggtagaatctacgtgtcttgaagcttgattaaatgaaggtgaggaagacagaaatcttaaatgatacaaagttctgacaagagaagtttaataaatagtagttccatttaccaaggtgagaaatatataaggaggagcacatttggggtggaattcgttttgttttcttttgttttttattcatgtcatgttatgtttgaagtggacttgttcagtaagcagcagaaaatatgtgcctggaatatatgcgctcatttaaaagttatttccttttaaataattgctcattctgcagaaaatggctgactttgaatatcagctgttttctttttctttttcaggaaatcattcttgaaatggtaaacatccaagttttatcaaataccaggatataattgcctggtgtgaattattattttgttagtaactataatagataatccacagaaaatcttttggaaataaaagacttgaaattaaaagctatctggaatgttatatttaaggacacagaccttgaatgactgttcttcaagtaaagagtctttgttgacagatatcaaaatgtcttatattatgaattcacctcaacttagaattatgttaaaatgtgtggccttccttgaaacaccacctaaaagaattttcttattgtcaaacaaacacttaaaaaatagtttttgaaaaatgagtaaattggtattgataatcttatagaacatgtgtacagtttttaaaatatattgaatgtaaatagtgtctttctgtgtgaaactaaacaaatattggacacctccaaaaatattttgttctgaaattttccttggattgaaaaaatgactcaaatcccatattctacttacatctttattgtagcatgacttagggctcttctgtgaatgagcgtttacaccttattttaaaaaattatgttttaaaacaatttcctttgaaaataatggttttcaaaggaaaaaaagagcatctagggctcagaaaattttctttatacttgcaattcaaagttattttcctgcagcaatttcttaaatgaagatttttttaattaaaaaaactatattttgttgttgcaagatagaaataataactttgttgttcaaaattgacagagacgagcctaatgacttccttgtctgaccttgtctataaacttggaaacctcacagtctcgtcttcctgttgtcttcggatgtaattttgttggtagctcaggtcatatttgcttgtgtctatagtaactgagcccttttcgactttaggcactgtgcaagttagttggcatatgccacaagaataaaaaataaaaccaacagctattgtctcttggttacaatccttaatgttctaatgacctttctggaaaggtgatatttacgctgagatcctctgaactataaaaattggagggagagagaaggggaagacattcagtacagagaaataacatgtacaatggctcttaagcttcgaagaattagcgaacttagggaaatgatagaggccagcatctgtggagccatgaaatgaggcaggaaagtttgacgggacacctgtgaatctagagtgttttaacttcatcctaaggtcaataggaggccattgaacaatttgaggggatgtcacaatgggatgtacacttgggcattactctgatgctgtttgcagtgagaagaatatagagagggcaagatctcaggagatacagagttttatgttgggtacaggttggccgaagtaaattgtgtttatctatacaataaggttagatgaagtttgcaattgatttagttaaaaaatttcaaaaactggatgaccacataaataggaacagataacctattcggaaatatggcttccccggtccatcagatttcccagtggaatggcacccatgacactaaaggcccaatgtgagatctgcctagttatagaaagtaaaatctttatttttaccttaccctgttcaactgggatattacatcaccacttcgaaagaatttgaactaatcatctatgtgcttccattcaagagaatatttatataaatatctggttttttataatccttaaactaaacctagaataaaaaggccacatcatcatcagtggctcagccagctttccagaaggctggaaagccattcacctcgaggaggctctttcacttttgcggggtggctttgacaagggtagtggcacttatgaaggaaagaaagtagcctcacatgaagtattatttgcagggagcactgacaggctttgcagatgagttgaatggtaggaattgttttggagaaggtaagaatcataaaggattgcctgatgatggattgtggtgtgagtgagctaatattcctaactcagaagcatccattacttaaattaacaactaaggtgtgattgtgtcccagtttagagttcagcttctatttttgcactggcctagtgctctacattctactcctgtctttttaaccgttccttacttttcagatctatataattttatgctttactttttattgatgttgaagaaaaggcatttcttcttcttaagcagctagtatgggtatcataattcagctcaaaatcagttacaaggattttcattgttcaatagtgtaaaaatataataaatatccttgatgcctgtggtgaaatactatcaagcagctaaaaagagtgtattagataagtggttctcaaccaggcatgagtttggccatgaataagacatttgacaatgtctgcagttttttttatcgtaattactgcggaagtggtagcattgtactggcatctagtaggtagaagacagagattctggcaaacatcctacaatgcaaaggacggcctcccccgaacaaacaattatcagtccaaaacgttaaaagtgccacttttgaaaaaccctgtattaattagatccatatctcacaataattatgtaacccaaatatataatattgagtgaaaaaggaaagttgtagaacgattgcaaagcgtgatagtatattcattcttttaatgctagctagcatagcaaaccaaacccacaatttcagtgccttaacacaacagatatttattgtttgctcatgtcacagtccatggcattccatggcagcgtgttgctttcctgcatgtgacgatgcaaggatccagacgtcttccattttgttgctcccccgcatctcttcaacctcagagtcatctgcatacatccatagaatgggaaagaaacagcagagaagatatattagctttttaaaatctgaagctctgaattgacacaaattacttccactcatattctactgggagaaacaaatcaaataaccacacctgcatgcaagaagagctatataatacaattagaggctgaacagcctgtcagcgatactacctgggtatggagtggatcaacatggattcttatggatagctcattagctcaatgaaggatgccaagcactcaagtaaatttgtaaagaacatacacacatacatacacaacaacaacattatgtattgtttatggatataggaatgtatgtgaaaagcagaacaattgagctaaattaatgaacataaaattcatatatcatggcctcttataaagacgagagcaggagaacaggcctggagataaggaagtaaagtgttttcacatgtatttgaatcattttcttttataattagattatgcacaataaattaggacagattattcataattatgatttcctggagatatgtactcattgtataagtctctggacttctctaattttacctttctcaaaagaaaataaataagttgagtaagttggatgtatttgtatcagccaattaacttttatattgatatttaaatgagatataacatctacattattttttacatttatgtaaaattctagatatataaaacaagaatttttataaaagctattgttgttattaaggtatactttggtggaacattgtacagtgttctttatcgtatggtcctattcagattatgtaccaaatgcaatactaatatgctctcaagcttcttgaaaaaaatcctatctacatcacgataatatgttggtaatatttttgttccctgtttattttggtatctcaagtagtctcatcttttcttttagaatatacctgatttttaagtcatcttgtaaatatcaataatgtctttctttcttgcaagaaacagaaacccaaacaaaatacaattcaaaattcaaggtgtatttgtgcatactctggattatctactggtagaacccaagaaaaatttaacctacaggccatgggaatgatggggccataggccatctccatagtggtatgctactaagaatgactcattgcacaaattctcattttatgagtctcaggtaaagtattttaggaagtgcatctgtttgttccaagttgaatcaggcctcaatcttggtccagtcagccttgtcctagaggcaaatatcacacaatacaaacatgatatcaaggactctgcttatggattgtttgactggagggtgatagtcgccagagaagggagaaaaattatggactgagtagaacttcccaaatatctcttgtttagtgtgtttcttgttccacattattttgacagaaagaattctgagttatattatttgatcctccaagtttcaaaatccttacaaacaaaaatgtttttaatgccttcacatgtatgtttctttctatcatgttactttgaattatgaatgcatcaatatgtaatgttacagcattaaatgtatcaagtttgcttctccactacattataacacacacacacacacacacaaatgaattcgtattaaactttttgaaatctatgatttaaatagagagataagaagaataatgactggttcattatattacacaacctatgctttgtatatggttttcttttttaaaaatgtactttgtaagttgagaaaaaaggtaattgacaaaataccagtgtaaattttgaacacaataaaataaaattacatcagcccaattacaaagcaacatgtatgaatagcttaaccaactctcctgttttaggtccttacgtgaaccaaaatcctgttgttatttatcacttattggaaccaaaaagagccacagatgttgctttgaagagcaggatgctatgaagtactgttttaaagaccttattaaacacttcactgaaataggaagtcatttatgtagtcattaatacccctcactgcatttaaaccacagttctcaaaggaaaaagctgctcctctctcacagttttgttgttacttacttttaaaaatcaaagatcaatacctttaatgagaacatattgggaatatctatgtgctacgctctaaattaagcattagggcaaaaaaaaaaagatgatttttaaagtcttttcttttgaattttgaattgagatagaaaaccaacgttataggcccataaaagggcctgtaactggagacaagaagggggaaaggctgaaaaatatacctataccaaatttgaagagagcattgatagtcagtaaatatattgcagcaacattatgaaggtttgtgtaagccatgataaaaagcatagaataaaatatttaacataaaaagtagaagaggctcagcaaaaatttccttctattcacctgtcttaaaaagttaagtatttttatcttgtgtttaatgaagaagaatttggaaactaaaagttccaaaaattaataaatttttggctatgcactgttatgtccttttgttaaaaaacactaattgttgagaaaaacctgattgctctatcatctttttatattcaaaccaaatgtgcttgattaaatgttttagatgtcttattaatagacagtcttgatcttggctaaaacatctatagaaaggcttacgcagtgtgctaggtgcatgttgaactccctgtgttgttcaaactagagacataaatgattaatgaatactttatcatatgttatatgtgtattttatatatatatataaaattatagtcatgtactcatctgtaatttcaagttggtagacatttttgtttgcataattttgacagatttgttttgttttgtcttgttttttgagacagtctttctctgtcgcccaggctggagtgcagtggcgcgatcttggctcactgcaacctccgcctcccgggttcacgccattctcctgcctcagcctcctgagtagctgggactacaggcgcccgccaccatgcccagctaattttttgtatttttagtagagatgaggtttcaccatgttagccaggatggtctcaatctcctgaccttgtgatccacccgcctcggcctcccaaagtactgggattacaggtgtgagccaccgcacctggcctcgacagatgttttcataaaattaaataataaaatacaatctacatattaaagttttatatatttctgtaaattgagatatttttattgtcggcactatttttagttaggttgcttaaataaatactaaatatacaatgaaaacgaacatacctagtacagtcattctactcatcacttggtatagttgatgtttttttttttttttctttgagaccaaattttgctctttgtcacccaggctggagtacaatggtgcgatctcagctcactgcaacctccacctcctgggttcaagcaattctcctgcctcagcctcccgagtgcccaccaccacgctcggctaattttttgtatttttagtagagacggggtttcaccatgttggtcaggctggtctcaaactcctgacctcaggtgatccacccacgttggcctcccaaagtgctgggattacaggcgtgagccaccgcatttgaccaagttgatgttttatttgttattaatttcaaaggctgacatgtacttatgatttcagtagttaccagctactctacacgcagcatggtacaattaaatgtatatttagcttttggaacatttctttttaaaagttgtgcacattttaaaaaccaagttatctgaatcacgtgttaaaacatattaaaacaagactgagaattccatttcggacaagatggcataaactgatttttccctgctcctcatagtgaagaagaacaataaaacctagaaacaaaacaagaggccatcaaaagaaaattgtaaaggatagtcagagaaaagcaaactgctttgagagcctcgcgctagaggaaaataaactgcagcacattctcatatgtgcccctatccaacagaagatggggacccccacctgtcattttccaactttcaagcctagtagcagaaggcagcccagctagtttcctctctgaattgaataggagtctctcagacaataccagatgagcctggtataactggcaagggctattgaatgggagcccatctaacattaagcagctagggtaagtgcctctcctttcccagggatttaggactaccatgctctgctgaaaaatagacaagtggcagtattgtttagaggaattttgtcacagcaagtggcccaacctcggaagcctctttgtccctacaggcctaagacactctcactcactctcactcacaacaggaaatacttaggtggctgggtgcaactgccacaagggattttaccactctaagtggcctagtgcaggaagcctctttgttcctgtgggtctgaggctgccctctattgtacagagatactggggcagccacagggtactagaagagggatccctcaagaacaaaatcccatccagaaagcactgtctgttcccaataggcacagagatcttgccacaagtgtcctaactactgaagcctcttcatacctgcagaactgaggctctcttttccgacaggaagacatcgaggtggaaaggcagaaattacaagagacacaatcataataagtgacctggttcagaaagcatctttggtcatatggacctaggacttctcttccccacccagagatacctgggcaaacacagagcactggtaaggctatccaccacaaagagtgactagcctgggaagcccgttggacgctatggccatgagaatccctccacttttacccagagacattggagcagctggagggtaccagtatagggattctaacacaataatcctatctaggaaacacttttatctctatagatctaagaaacccctactctacctagcagcaccagcaccctagtctggggaactccttctgcccactcagaatgtaccatcaaggatttttgagagtaccagcatcactagataaaccaagcaggcctcaataacacgagaaatactctgaaaataaaactgtctttgggaccacagcccataaaagtagaatggcacctgtgtattgaactacgtatggtaaatacctgctaaaataaaagattgaaataagatccagattctgcatatataatggacaaaatgtccagagtaccatcaaaagtcgcctgcatactgagaaccaaaacaaacaaacaaaactagaatgagaaaagacatcgactaatgctatcacttagataaattagatgttgaaattatctgacaagaattttaaagtagaagtcaggccaggcgcagtggctcatgcccgtaatcccagcactttgggagaccccggcgaccggatcacctgaggtcaggagttcaagaccagcctggccaacatagtgaaaccctgtctcgactaaaaatataaaaattagctgggcatgatggtgtgtgcctgtaatcccagctactcaggaggctgaggcatgagggtctcttgaacccgggagagagaggttgcagtgaaccgagatcgcgccactgcactccagcctggaccacagagtgagactccgtctcaaaaaaaaaaaaaaaatgcaatagcatttatgatttctgcaaagaaaatgaaactcttacatataaaactaacaaaacatgcacagaatctgtatgataaaagttaccaagtgctagtaaaataaataaagaagacctaaatatatggagatacattatgttcatggattggaaaactcaccatagtaaagatgtgaattctctctaagttgatctatttttaagacaattcttacgaaaattttagcaatgtttttgaacttacacaggcttattataaaaattatataggatgtatagaatggcacaggacctatactagccaaaactattgaataaggaaaaattaattagagaaatcactcttactgttgttaaagttaattatatagcagcagtattctagacagtctgatactggtggtgtacagactcatatatcagtgaaacagaatagagagcccagaaatagatccacaaatatgcccaatttatttatttttacagcttaaagtataattgatatacaaaaatctgcacatatttaatgtatacaatttgatgagtttggacatattcatatacctgtgaaaccatcaccacaatcaaataacaaacatcaattccctggaaaagtttccttgtgtccctttgttttggacgaagcaggaatccagtaaggagggttagcctttttaataaatggtgttgtagtaatccaacacccataggcaaaaaacaaacaaaaaacaccttgatctaaacatcagaagaacttaaactgtaaaacttactcaaaaatagaacatatttgggatctaacgttaaagtgttcttagacttgacaccaaagtcgccatccataaaaggaaattttgataaagtgaacctcattaaaataaaaaacttttgctatgcaaaatattctgttaagaagaaatataaccgggcgtggtggctcgtgcctgttaataccatcactttgggaagctgaggcaagctggtcgcttacgctcaggagttcgagaccagcctggccaacatgatgaaactctgtctctagtaaaaatacaaaaattagctgggcgtagtggcgcacacctgtagtaccacctacttgggaagctgaggcatgagaatcgcttgagcccaggaggcagaggttgcagtgagtcgagatcataccactgcactctcaaaaaaagaaaaaaatgaaatacgagctacagactgggagaaaatattggcaaaccatatatctagatatcaagaactagtatcaaaactacataaagagctctcaaaactcaacattttaaaaatccaataagaaaatggacaaaagacaggcacagatgtttcaccaatgaagatatacagatggcatatataaatgcattaaaaaatgttcaacatcaacaaccattagtaaaatggaaattaaaaccaaagtgagatattattacctagtagtcaaaatggctaaaataagaaaatagacaccagatgctggcaaggaagcggagaaactgggtaaatcatatattgctggtgggactgttaaatggtatagccacactggaaaatagtttggcagttcattttcaaactaaaaatggacttagcatatgacacagcaattgccctcttaatcattcttaaaaaaatgaaaacttgttttcatacagaaacgtatccacaaatattcatagcagccttatagtaccaaaacacacaaaaaagtcccttgatatgtaattgcttaaaaaaaaaaaaaccctgtggtacatgcataccatggaatattacccagcaataaaaaggaattaactattggataaacctggtgtaatttatactgagtgaaaaaaaataacaatctctgcttaattttgttgttcacccaaaagtcattcaggagcaagttgtttggtttccatgtaattgtgtggttttgagaggtcctcttggtattgatttctatttttattccactgtggtccaagaatttgtttgcttttatttcaattttcgaaatttattgagattcgctttatggctgagcatgtggtttatcttgcagtacattctgtgtgcagatgagaagaatgtatattctgtggttttgggtaaagtagtatgtagatgtctattaggtctagttggtcaagagtcaaatttaatccagaatttctttgttagttttctgcctcagtgatcggtctaacactatcagtaggttgttgaagtcccccattattactgtgtggcttcctaagtgttttcgtaggtcttgaaaagtacttgatttaggacattggtgtgccaatgctgggtgcatatatatttatgatagttaaattttcttgttgaattacaccctttatcattatgtagtgaccttctttgtccttttttactttactgtttgtgggagtgtaaattaggtcggctactgtgaaaagcagtttggagatttctcgaagaactaaaagtaaggactaccatttgacccagcaatctcattactgggtttatacccaaaggaaaatagattattctaccaaaaatcatatgcactgggatgttcattacagcactgttcacaatagcaaagatgtggcatcaacctacatgcccacaatggttgattggctgaagaaaatatggtacatacacatcatgaaatcctatgcagcaataaaaaaagaaaaaaatcatatcctttgcaacaacattgatggagctggaggacattatcctaagcgaattaacacagaaacagaaaaccaagcaccacacgttctcacttataagtgggagctaaacactgagtacacatgaacataaagatgagaacagtagactctggggactacaatcgaggggagggaggaaggggcaaaggctgaaaagctacctattgggtactatgctcactacctgggtgatgacttcagttgtaccccagacttaaatatcacacaatatactcttgtaacaaacctgcatatataccccctggatgtaaaataaaagttgaaatgtaaaaaaggaaaagcaacaatctaaaatgaatgtatattgcatgtttccatttgtttttgcttgcttgtttgtttttgagacaggttctcactcttgcccaggctagagtgcagtggtgcgattgtagctcactgcagccttgaagtcctgggctcaagtaatactcctgcctcagctttctgaatagctgggactacaggcacacaccaccacacctggcccatttttaaaaattgttttgtgtagacagggtctcactatggtgacagaccaggatccctggtctccagcgatcctcccgccttgacttctcgaaatgctgagattacaggtgtgagccactgcatctggtctctatttgtgtaacatttctgaagtaacattattatggcaaatagatgagtggttgcccgcttgtgaactcctccaccttgagggctcagaggctggatccatagatatagcagaatgtgtttgtgtgtgtgtctatgaaaaggagtaggaggctgagggtgggaaaatgccatggaagcaaaatatgattgagcatgactagcttctcttgtgactgttcagcccaaaatgtccaggagtcataaacacgttgtgaaagaaatttccagggcatgcatctcataaggacgtgtctgcttgtgggttctcaggaaactgcagaccctgccctgcaagtctggcctctctcatggacagtcagagggccatgaggttgcattttttaaattgaggtaaaattcacataacataaaagtaaccattttaaagtgtacaattcaatagcatttcgtacattcacgatggtgtgcaaccatcatctctattttggtccaaaatattttcatcaccccaaaggcaccactgtatccatttatcagttagtccacactcctccctcacccagctgttggcaaccacgaaaccactttctgtctctaaggatttgggtgacctggtcttcatgtcaatggaatcatgctgtatgcagccccttgtgactggtttatttcactcagcataatgtgatatggattgggggaaggtggcaggtggcctataaaaggataacatggggtgtcttgaggtgatggtacatctaccacttgtgttgtgcttacgtgaagtgatctatgtggtaaaattgagtataactatatatacacacacacatacacacacaaatgtatacgtacataaatggtgaaatcagaagaaggtttatggattataccaatgtcaattcttttgatattataccgcagttttgcaagatgtaaatattgagtgagcctccgtgaagggtgcacaggaccttcaacctccctatacaattttttgaaacttcctgtgaacttgtagtttatcaaattaaaaagaaaaattcaaacagccttagtttagatctttaaagcctgatcctaatgaaattaaattcattttcatcccatgtatataatattgatgctcaccccaatgattcgtagattacatatttttgacaaagaaagaaatgtaataggttgttactttcttttttacttacaataccagtatcattttgctgaatttaattggggagctctatagaatacaacttgaaaaatactagtctaacttatgtcagatgttcaaattaatgtagcttagtttcgtgctctctggacttttagacttcatgattcaactaaatttaaaacaagttagaaacaaaccagagatcaaccttgagttgccattttcttactttgctaattagggcttctcaccattgtaatataaaagaaaaagaccctatcagcaccaaaacttggaaggacctgatcacagaattaaaaaatgaaataattaaaaaaaaatactccagcctcttcatgtgtttcctgtttcaccatggcctgatgtgaccgtcatcatgcactggaacctgaatttaaacgcatgttaatgaactcctcaaatggcatttaccgaatcagagaaaacttgaaagaaacttaactagcagtggtccatttgagtaaaaatataatacataaaaggaagatctcttgaattccaagcctgacaaaaatttcatctttattagatggaatactatatatcccattttaagaggtatgcatatgtacataaatcggaaatttgcaagtaatatatgtgattttaatgaacttcaaagaaaacaatcatacaattgtatagtcacaccacatatatatgattgtagtgttagtaatagtgttttctgagtgcaaatgatatgtatatgtacgtaaacatacacagagatgcatgcatatatggaatatatgtgtatgcaagtacatgtcatatgctttcccatgggcaaatgattatgccaatattttcccaattttctaggatgttaacactcagtctcttttgctcaattccatatttaattttagtcctgttgaatcattaggatgtctttcatttagtccaagtcttactaatctgagttccatagtccatcacaatcccactttttctttggaacacttcctaaatagcaaattgccaatgttaagctcccttcttctgaccttctctagcattaattacacgtacctcaggtgttgacacataattatggtatgtctcagcttgtcccagaaatgatttttagtgatacatgaacatacgctatatacttttttaaatagaaaaataattgctgacatttaaaacggatctgaacttttgcttagtattaattctattcctcacaaaatcccacattttctgcccatttttcagatgagaaaagccaaagttaaaagggcttaaagttcgtgttaactcagctagtcagtggtagagctgagatttatagccaggttttctctttcccatgtgtgactctccaccagtattcattgctaattttatgagcaaatttgtagaagcatgtattcttttgaatgaatataagaatgacatttactaggctgtaccatacactgattcaatcaaaccaactaatttgcacaaaagcttaagtgaaatctctaagatttcatgcagcctgaattttaaatttggcatgagataggagactgccctttgcttagaaaacaaacagcacaacacgacaaagacataaacttgccccaatgccattgtgcgggagagcataaacctgtggtgagtcaaggctatagaaattaggttctgtggcccatctaatttgttgcccatgtcaggggccagcatgctgtccaggatccagctcattgctggcttcctcgctatgaaggcaatagtcttaggatccttgttataaacgtttggaaaaagtttctgaggccctcaaatcttcctggaggaggcagatatacagatatagcacataccaggaatctcagtcatgggctcctcgatggcagatcccatcagtagtgtttgaaacacacagtttgtacatcataagccccaaattttgatggctagtactaaaaattattttcaaagttgtatttcagtatttacataactattgagaagtgatttcttttgagagactcaaacaacagaaccttattttagctaatgaatttgtacatgcaattccctaattttcatctccctggcagaatggtttctacactccaccttatcctatagactaattacaaattaaccttactaaatattcatttttttctcacttcttcctttgctcacaaatttctagcatgtgccttacatgcatgcattctagttcagactaagactctgacctttcatgccaccttggatcccaccttatttctcaatattctcaacatgaattttctaaatattttcagcttagacctttaaatctatcaagttataattagtgctgacttggtagtggctaatatcactgtaatacataaagtataatgaagaaaatatgtgtttaagaaatatgaacagtagaattctctaggatttaccatcaaactacctgtgtgacctagagctaattatataaatcctgagcttccattttttccagtaatagggagatgacattagatgattcttaacatactctttaatatctttgacaaaaaaaacttcagttatctgattgcttatcctacttgtgtttgttttgtattctcttatgtatgctgggaaatgtgaatccgtatacaatcactgaattatcataatgagattcatctcctggcactggtgctaagattgagaatttttgctattgatggacagagctgtggtattgtgaggcaatatttcttattatattgcttttgttgaagttagtaagtagtataatcctgaaagcaaaataaaatgtggagccaaacaaattgcctctcatatttacagagggcaggccatgcatattacttcacattatgcataactgaggttgtaaaatactgctgtagtgttttgatgattcaacagttagtgttcttcctcaatcaaagagctgatgttaacagaacttgccacaatacagcatatgctaattgcgtatggcttcatgtgggcccttcaaatataaaaagtcaaacttttagaaaccactcaataccagacattcaaaattctgggtggcagtaagggatatcatttgatatttgaagtcaagaaccggattagattagttagagatgcaggaatatttgcaaggtctgtatgacctttacataacatgatctactggaaacctgtttttctaaatgtttatatgtatgcacattgacatttaaaatgaaaacaatgggatgtaaatcctctcattaagatgggtgccactgactgattactattcttgaagcaatgttgtcctttttcttgcatggtaaatgcttcttttttaaaaaataaaaaagtcattgctatgtataaaatgcatcattcagagattataaccagggttggaagtatcatatttgaactttagcttagacaagtccagaacatgttacaacagggtcactgtttgatgttacattgttgttcagagctcaactgtgtgttaggcctggactgaggacacagtgacaccctttattgctgtattgcacagttacatctcagggtaatgcttagaggtgggatatgctaatatagtagtctaaaatgtgcaatcaataattcaataattatttagggagggtcagataccacgctatgtgttggaaatacagtggtaaacaagactatttttaccctcatggtgattaaaatccactgtttttttttaaattattttaggatttgtcaatattccaagggcctaccgcaaggaagagcaagtgactaaagcttgtttctaatctttctctttttattcactatttttacctttcattttgtctcacagacatgatttgacccagtaatgtctcaattctttcccagaacaatgtggagataaccagatcataaacagctccacctctaattacaatctgcgtcattttcttgtgtgtgtgtgttttttttttttttcattttgatgtcattaccatagggaggaatcccacaatggggcaacaatcaccatcagttcctccacaacatgtggtttcaaccatgactcttgagaaagactttagctctatctcagaatattcccaataatttgatttacttaaactttatggtgcaaataatgtaacccatttcacgattctatctgctttattcttctttcgtcctttttgttctttaacatgtgactgaattataaactgccccttgaattcatatcagtcacaaaataaccttgataattacttcactctacatggatttctctataaatacatttcctctctgatcaataccaaccaactcaacatcgtccaagttctccccaaatccaatgaactcttccttctttgaatttagaacacaaattctatctcatgtatatgcatataagatgtcattggaaaaatgggggaaaagatcttaaagggatcagggaggctgggtatggaggctcacgcctgtaatcccagcactttgggagactgaggcaggcggatcacctgaggtcaggagtttgagaccagcctggccaacatggtgaaaccctgtctctactaaaaatacaaaaattagtcaggcgtggtggtgggcacctgtaatcccagctactagggaggctgaggcaggagaatcgcttgaacccaggaggcagaggttgcagtgagctgagattgcattactgcactccagcctgggcaacagagtgagactctgtctcaaaaaaaataaaaatgaaaaagaacacacatttgctttgccactcacatggtcactattcatgttttaacttaaatcattgaatggtcttattgtgttttcttttttttggtttttttttttttggttttttttttgagacagagtctcgctttgtcgcccaggctggagtgtggtggcactatctcggctcaccacaacctccgcctctggggttcaagcaattctcctgcctcagcctcccaagtagctgggattacaggcacccgccacacacccggctaatttttatatttttagtagagacgaggtttcaccatgttggccaggctggtctgaaactcctgacctcaggtgatctgcctgccttggcctcccaaagtgctggaattacaggcatgagccaccgcgcccagccttgtgttttcatatctaatgtttcatcacatggaatgcagtgttcagagtggagattctaggatagacagatagataattgctaacagtgcttaaaaaatattcagcatttgataaatatttgcttttttttttttagttttaggtaaaattaaggatcattaattttttacacctttgatcatgttaacatataaaagattaaataataggcaataagtagcaataaaataggaagtttagtttttccaaaaagtttatgatacttttattatttaaaaagaaatatataaaataatcacttggacactatgaaaatgttggaactgtaacttagcaattagaaatgcattagatacaaatgctatacagttactttatattcaataaatgttcattgatagtaattgctaattttaagatcttcgagaaaatagatacaatattgccacaaataacacctttttaaatacaccttggaatatcagggttataaatagttctttgtttggatgacaaaagtcttttttctttagccacagctgttgataatataaataattcatttttaaagcaataaaaataaatacagccaagattatattcatttatgtttgggggccatatatatagtttatagcataaaaaagcagtgatcttatgttgaccctttctctaaaaattaatagtttattcagcttcctgtgttgaaattgtttttgtttatatactattcccttatattttgcttatatttgctctctttttctgaagaccaattattgaccataaaattagataatcttggaaggtgttaacatttcctagttgaggacgtgtgcaacgggatggattttgctgccgtctagtttcttctcaagtgtctaagctgaggcgttccctactaaaactcaccactgtctggaaatcaaggcacttaactctctgttgtgagggggttgattgtaaatgtcccaaggtattgcaaaagcagaaggacccacgtagagccatgcaaatgagagtgggtagatacattttatgagtgggtgcctcctattctcagccctggtgatttttagggtggtctcaggtgtgtctcagggtagagaggtatagagttgccattctttgtctgatttttttttttccttgtctattgctttaggataaactcagccttactttactcacagctacaattttggctctcaaaagatagtttgggaaaatgttttaaaaatctgactatttattgtttcttgatgttttcaacccttatacaataattttcttttccttgaatacccattgatgatatatgaaaaaaataaggaccagaaggtgaagtgggaattttaaaagtatcaagataaaaacataagcgttatctcactagagacataaacccaaatattgtgttgatcagggtagagtaaagaaagcattgcccctgttaaatcacttatagctacgatccacttggtaatcattataaatctgtgattatatatatatacatatatataagctccatatgattttatttattatgaccttttattttacgtatatattagactctgaagagccccagggtatttgtcccaagatctttgcaaaactccgaatttgcaaacatcactaaggcatataattctactcataaaatgcagtaaagtatggctaattacagagaccccatcagactcttgatgattgtataaacttaagtcatatataacactattaaaataaaatctactactaaacaaaccacattgtattatatcaccccaattaaatttttaactatgaacttgcctcaatctgaaaataattgtagtgagcgaataatgatacttgctgtgtaataggtgcctggcatgttttctttaaagtaggacacttttatttttaatttcaacttttattttacatacagggagtacacatgcagatttgttaaaacggtatattgcacccagatagtaagcatagtacccaataggtagcttttaactccttccccgccggtccctccccactctagtagtccacagtgtctgttgttctcatgtttatgtccgttgtgctcaatgtttagttcccatttataagtgagagcatgtggcatttggttttctgttcttgcattacttcgcttaatataatgtcctccagctccatccatgtcgctgcaaaggacatgattttgttcttttttatggctgcataggattccgtggtgtgtatgtactacattttctttatccagtcaaccattgatgagcttttaggttgattcgatatttttgctattgtgaattgtgtgacaaagaacataccagtgcatgtgtctttttgataaaatgatctattttcctttgggtatatactcagtaatgggattgctgaattgaatgatagatctgttttaagttctgtgagaaatctccaaactgcttgccacgggggctgaaataatttacattccaaccaacagtgtataagcactcccttttatctacagcctcaccagcgtttatcttttgattttttttttttttttttttttgtcacccaggctggagtgcaatggggcaatcctggctcactgcacctcaacctcctgggttcaaatgattctcatgctgcagcctccctagcagctgggattacagatgtgtaccaccacacccagctaatttttgtatttttactagagtcggggtttcaccattttggccagtctggtcttgaactcctggcctcatatgatcctcctgcctaagcctcctacagtgctgggattacaggcgcaagccactgcactcagcctttcttgacttttaaataatagccattctgtttggtgtgagatggtatctcattgtggttttgcttttcatttctctgatgattaatgatgatgagcatttcttcgtatgtttgttggtcgcttgcatgtcttcctttgagaagtgtttgttcatgtcttttgtccattttttaatattagacttttgtcaggtgcacagtttgtgaatattttctcccattctgtagattatctgtttactttgttgatagtttctttggctgtgcagaagctctttagtttaattaggtccctcttgtcaatttttatttttgttacaattacttttggggacttagccaaaaattctttgccggccgggcgcagtgcctcatgcctgtaatcccagcactttgggagaccaaggtgggtggattacccgaagccaggagttcgaaagcagcctgaccaacgtggcaaaaccctgtctctaccaaaaatacaaaaattagccgggtgtggtggcagacgcctgtaatcccagctacttgggaggctgaggcaggagaactgtttgaccccaggaggcagaggttgcaatgagtccagatcacaccactgtactccagcctgggcgacagagtgagactctgtcaaaaaaaaaaaaaaaattgccaatgccaatgtcaagaaggacatttcctaggtttgtttctaggatttgtagttttaggtcttacattaatatctttaatccaccatgagtttatttttgtatatggcaaaaggtagggatcaagtttcattcttctgcatatggctagccagtgatcctggcatcatttattgaataggaagtccttttaccattgcttgtttttgccagccttgtcgaaggctggttgaaggtgtatggctttatttctgtgttttctattctgttccattggtctatatgtctgtttctgtaccaatattatgctgtattggctactgtagtcttgtagcatagttggaagttctatagtgtgatgtactgtggtgtgaattattgtagggtgaagtactgtagtgtgatgcctccaattttgttcttgctgcttaggatggcttcggctatatgcgctcttttatttttttttttggttgcatatgaattttagaattgttttttctaattctgtgaggaatgaccttggtagtttgataaggacagcattgaatctataagttgttttgtgcagtatagccattttaattatattgtttcttccaatgagcatggaatgctttttcgtttatctgtgtttctttcaacaatgttttttaatactccttacagagatctttcagcatcttggttaggtgtattcctaggtatttcattttctttggctattgtaaatgggattgtgttcttcatttgactctcagcttggtcattattgttgtatagaaatgctattaatttttatatgttttactataaaaatatatttttatgtattgtatatcttgaaacctcgttaaaattgtttatcagttctagtagccttttggtggagtctttgggttttctaagtatagaatcataccgtcagtgaaaaaagatagtttgacttctttttctatttggatgcattttatttctttctcttgcctaattgctgtggctaggacttccagtactatgtttaataaaactggtgagagtgggcatccttgttttgttccagttctcagtgggaatcgttccaacttttgcccattcggtatgatgttggctatggatttgtcatagatggttcttattattttgaggtatgttccttcagtgcctagtctgttgagggtttttatcatgaagggatgttggattttattgaaaacttttttctgcattaaaataggacactttctgtctatgcttagcgtcttgtttattcttatctactttttacttgatgagatgtttcttcgcaattaaaaatatttaagtgacagtatagccacccatactttttattacagaaataaaaaatgcttcgtctctcatctgtcatttgatgaaaaaatccaagactttcttctaaaacctgcaaacatcataattcatatttgtattgcctccaactatcttctttcaagttaaccaccctttcaactttcactaaatctttaactcctatttgacgaggtattgaacgctgtactcaatgaaacacttttgcagcttctcttttggttatttatttttctttggttttctatagagaacataatggggttgaataattcaaaaatacaaactcttgctgatttcaacattgcacttttaattatattaaacttgtacttcctgggtcaaaaatcatctacgttgtaagactctttactttttctacctttttattgccagccttgtcagctatctttagggtagaagaagtgggagagatggtaaagcaatgagttgtgatttatttttctcaaaagaggaaagtttgcttcaaatcaaggaaatcaatacctacataaaaataaggggaggccaaggctgatttaataaagagaaagctagagtttcatcttgaatctctcactagcatagcgacttatgtatgaacctcagtaaatatcaatattctagacatagtggggcttcggtgtttctcaggaatagtcagacacatcagtatttaatctataatttaataaatccaagggtcttcttatctggaataaagctgactaaataatttagttgcttataaagcactaatatttagtactaaaatgacctgtcaatgttatttacatttattttatgttaactgaaagctatgttgctgataaagcttatattaagttcaggagttttaacgtggaattctattaatatggactcttaggactcaaagtgtttttcattaaatatcctggaacgtatgatataaaaattgagagatttatctttacgtattttgttctgcccatattggtattttcagcttattttctatcacagatttacatgggccaagactgaatcatagaatgggatattggaatttaatatagtttgttgatgctatggaatcattttttaaattatcaataacttattggatcttttattgccaaagtttcctaggatttcaattgaaatgcaaaaagaagaagtaaaagacattaacgtaaattctcagcagtttatacaaataaatttacaaggggcctatggaacaatacatgttggttttattttcaattgtagcaaaaaaataaataaataaaaggtagtttgccaacctctagagtgttgtaataatggcatcttttgacttttggagatttcatggaaattcttcaggtttccaacaagagccctccgggtgtgttgaattcatctgtacctgtgacagtcaggatctaggcaaaattcagaaaaacagtgagtacactaaatatagacttgccaagtctacagttctttagggaaaaaaaaattcctggactcagcctaaagtccccctaagttttagaggtcagtaatatttcaagtgactagaaaatctgaactaggtacatcatctttgttctcacacttagtatgattgttctcaccaagcatcattgcttttctcctttctgcataatttttccttactccttgattgccctttcactcttatgtgaccataaacctctgagtttccataatgtagacatgaaatttaatggactacattatgaaaatatttttttcaatgtcatcataatttctgtgccaggataacaagctcagaatatgggagtttatagtccagcatctctcccacaacctactatgactgtaaagaaattgtaacctgctccttatttccttcaatgctaatttctttgaaaattgattatgaatgccctccaatcaatatatgtaaaaaaaaaacctttatctttactaaaatacatatcctccagattcataacgaaggagaaaattctttggggaaagaagagtggagacccctcagtttcaattctgatccaactgactttattttgtccctagggttattttgctggttggtggcttaacattctaatcctagggtaaactaggacctgccttgccccttaacaacatgtgtaatcttaaatctggcccagtcaaaagttttaaacaagactttaggcggtaaaaactgaaagagaaataaaccaggaattaacaatgaactgataatttttgctgatgaactaccacttggcttacagagattagaacacatctttctaatcttatgacacaccaccctaggctgagagtcattctagcaccatcttcgtcacctactcccttgaaaggtacatgaagttttatttcctttcaaaattttatttttttatttttggtttcttgtttttagaattattatctggcaaggataggactttatccatggactcgacagtgcatttattttagaaaaggcgtgtatatttgtgcaatttatcctagcagagtaagttccaatatgtatatacaggccaaacaatgactataatatgtacatttttcttcattaactgtgttgattgcctgtgttctttcatccagcagaggcaaagtactaacatagaagactatccaaagtcttccagtagacttgtttagactagatttgaaagaagatcttaagtgtaagattatttttatactgttttcaacttgtatatttgtgcaatttgttgaacaaatgagaattagataaataattttaaaatataagtactttatgagtcagtttcccttttttgtaagttctgtttcccagacgtgcaaagcaatataattcttattatttcagggtataaattaaatttaacctgagcaaacaacttcttgtatgattgtattactatttttattactattatttttagagagactgatgacattctatcacttggtgtcatattcatctttttatagatatttgactaataatatgtaataatagtattatgaatggtgcccttaagtctgatgatttgcttaaggggctaaagaacaatatataaatggaaatctaaatagcactacttttaaaaagaataaacccatagaaagaaaattccatagctcaaaactaagaaactcaaaatccatataacacagaaagtaaaagggagcagttttctatatatatatatatatattttttaaaaagctctctgactctggttaaggatgcttgtgaatctaaaatgatgcatgttgataaagcactgtaatttaaagaagtctccagtcttgcctttaacagcaaaagcaagaacacattaaatatataggatctataagagaaatgaataaaaaatgttcaaatggaaatggtaaacatacagactagttcttaaagataggtcatgtatattcattttctaatttaaattgagctattttgatacatgtatatattttattattatgaaatatgtcaaacaactggaggatgactaaaaataatattaatataacattttgccgtacttgattttagaatggtggtaccaatttatgcctccaacagtagtgtatgcatcccccatttttcaaattcttatcaactagatattgacactttataatttttatcaatttgatgagtatgaaattatatctcatttgttttttgatcaatgtatcttttatattcattgaccctttattatttcctgctctgaatcatctgttcatgtcctttgccaatttttcaattgacttttggtctatttcttattttcatgtaattctttaggtattacagtttttccctttcactcatcggtctctaaataaacttggaaataatttttaggggtttttttgtgaatagtgaataattttgtgaattattttagagtaaataactgtcctaccatcattgtttaaatgtctaccttttctctattcacctgtagtgtcacctctgttttgcatcgagattagtatatacatgtacattagattagtatgtacattagtatttctgggcatctttttttgttctgttcttcatttgccaattcctgtgccagtactataatatgtctcaattaccatagatttatatttagccctgacatgtggtagggccagacaccctaacttgtttttcttcaaaactttcttagataaaccttgccctttgtctatcatcagttctataaaattatcagccattatctttaaatctggcttctctgcaattccattcattctcttctttaggaactcttattgtcgtataatattgtccatcttttatgtccttagtattttatttttaacatttacttgcctccctgtgttacgttctggatgaattcttcattagtatcttctaattcactaattttatcttcttgttcaatccagatacttaagctgtttatttctttaaaattgattcatttactacatttttcatttccaacatttatagcttttttcttctcaatatgaaattattttaatttctacatgcttttgttttataactacttgttctttttattgagttttatcttttaattttattgttgagaattctaaacatattatttaaaaatgttcttcagacatctatatgagaataatttcatctagactgaactcatggttgaatcattgtggttgtggtggtggtggtggtggtggtggtggtggttttctgccttttttaggcctttatttattcacagatttctggagcatttagagtaaaagggtttgcttttattgtcattgtgtttattatatctgttccaccactttgctgttgtccccatctggcccctggaatagctgcctagattcagatagtctactaccacgtggagtgctgtttgtggtgataattaattagaaatattgaagattcagtactcaaattcatttgttttgggctgcttctgccttcatggcgtgtgtgtgtgtgtgtgtgtgtgtgtgtgtgtgtgtgtgttcttcccgtatctctagtgtaacagattcctaacataataggctctcaggcagcaggtcagcaaaatttttaagacatttttcttttcaagaatgattgctgggtgaacttttgccataacttgtgacttcaagcagtgatcttaattctagtttatcctgtacatgtggactcttagtgaaggaatctaaatgcgaagccactacccatggggggaaaatagtctgtcaggactgcagctactgtgtctgatatgtggaggtgccaagattgtgtctaagtcctactgtgttataacactctttctttttttatattttctttcttattcttctatatattaaataagtgtcaagtcatgaaatttccatgccatcttaactgaagaggtttaaatgttttatatttaatctcccgttatttattgactttacaatgtcaaattaaaactcacattcaggcatatactactaaaatactaatagaagacaaactaggatcattatgtttagggaaaaatacacacatactatcatgacacagtacaattaacataaaaccaaacaccagaggtttctcttattaaagctgaattttaattgtttttatgtatctatattactgtctataatacaggttcttgagaattaggactgctgttgtgtgtgtaagtgtggatcgcttttgttgtaatttttgatcatacttctggaaactagcatgatagctggaaaacaggtccacaaatattaattgaatcaatgactgtttaggagacacacaggcatagatgcagcttctgtactacagtaccttacaacctatcatcgacaaaatacaaaggcaataagtactttttaaaaatatataattgtataaagtgatgagcaagaaaacagaatgaataagaatgtgtaatagtaaattaatcccatttcacttttgataggcttttatataaagctgatacaaaatactttttaaattctcagtgaggcatttgatgagtttcctaataatatttatgtaaatataatagcaagtatacaatcttctctatattttgtaacagtaatgactatccctttaaaaggtatctatttgattcagaggttattatttttctcttgtcttcgctaattttaattctctgatgatgttttgagaacacatcacttgaagatttttagtagggcagtgctgttgtctatgttactgaaaagtaactggactggagaatgtgaacatgcactcctgttcagtatttggattttaggagtgtgtcgctgattcttgaagaatttttttaaaatctttttaagaaagcatcattattgttacttaaaaatatttacctgttaagcacctcttagaatggccaaaatccaaaacactgacaacatcaaatgctgaccaggttatgtaacaacaaaatctctttcattgctggtgggaatgcaaaagggtacagcctctttggaaaacaatttggcagtttctcacaaaactaaacacacacttatcatatgatctagcaattgtactccttggtatttacccagataagcttaaaacatatccacacaaaaacctgagtgcaaatatttataattattcataattgaccaaacttgtaaacaatcaagctctccttccataggtgagtgaatgaatgaatgaacaggtacatgcagccaatagaatattattcaggacctttgaaatgagctataaagccatgaaaaaagaccaacaaatatgggggaactgtaagtgcatattactaagtgaaagaagctaatttgaaagggttacatactgttgaatttcgactatgtggcattctagaaatggcaaaactatgatcacagtaaacagatgagtggtttcagtggttgccaggggttgcggcaggaggtggaatgtatagacagattacagaagatctttaaggcagtgattatatattatccgaaatgcttgcgaccagaagtgtttcagatttcctttttttttttggggggggggggcgattttgaaatatttacattacacttaccagttgagcatcccaaatctgaaaatttgaaatccaaaatgctccaatgagcatttgctttggacatcttatcagcacttcaaaagttttgaattttggagcatttgaattttagatttttagatttgagatgttcaacctgtatgattctatagtggtggacacatcgttgaatacttgcccaaacctatagcatgtacaacactgagtgaaacctaatgtaatctatggactttggctgacattgtatcaatgtaggctcatcaattgtaacataccattgtggtatgaagttttgatggtgggggaagctgtatgttcgtagggctagatggtatatgagaaacctctcttccttccacttagtcctgctgtgaacgtaaaactcctctaaaaaacaaagtctatttttaaaaaaacatttactaggacaaaacatgtttttagcacaattttttaaacgcacagtaaagcgccatatgctcatgagcttcctttggaagcgcccatcttcaaacaagtatattaagataagttttgtccatatcatagcaggtattttattttcccattctgcatatatttaacatggtaattaattcagcctggtattactctggctgttattcaaagcctcatatatgtttgctaatttgtcacttgctcctcatacaacatcttaactatttaataagcagttaccaaagtctagacagtcctgctccagcatgagttttaattgagtatgtactacataagacaattaagatccgaacaaaccatcagcggcagatgatcctacagttatgaggaaagcttctgtaggagtgactgtgtaaaatgatgaaagcaaagggtcttggaatatcatatatatttatatcagggctctaaagacatactaggataaagtggagaaaggcatctctagggctatcttctgtcattttgttgccagtcgttttaccatcaaagcaatatttttagaaaaaggtttccatcatcatttaccaatattttagggaatctttaaagtctaagaacaaatcagaaggtaataataatattgaaaaattattccaaaatgtttagtacgttgtttgtcttgtttcatcaaaactatttgtagtagcagaacttttgttggtggttctgtaactgatgattagctttcagtgcaagtatttttcaggtaactgtgtgaaaatatttttaaacatttacactatgtttccaaaccggaacactttggtatagttatacctgtgaaataaatgacattgtgtaaaacaatatagcggatcttttaaagtgagttgacaggatgacagtacagttactcacagttcaaactaccacaatatagaatgtaatgagccataatgctattatttttcacttcagaattttaatattgtgttttgtacagttcttaaaatgtcatgcataaaacattgtgctgaaacaatagtgatttgtatatttattacgtcagtaggacccaacagtctaataacgataggaaacaatggaaatttttcctcagacttttttggaaactggttacacaaagaattgctttgggaaggatctaatgtttgaaaagcattctggcttgatctttagatacaacagtttgatcttttgtgcaactgagagcctctatataaatgcagctggagtgagtagggtatttgaggctatggcaccttcagtgatagggtgatttttgtcttactcatcctcagtgccaaccagaaaataattacattcctctaatagtgaattgaccactaactaaatctgaaggacaagaagcttggaaaaatataactgtgcaaaatggcttatcgaacttaccattttatagaagttgaacatggatctctaataccttggacttgcttctaatatggtatcacatagtttcatcaccgtgattactaatggatggagtgatatattttatttccaagtattaataaaacagcaaattatcataattgaataagaaggatgctacattgcatatttaataacgtatatgtgacactggacaagtaaggatgaattaatctcttggaataaaccaccattgaaagagcgtttctgtcaagtaatgtcatttactctccttattaacaaacagagcaattctgttggatcacttagcatggtgagcttattaggaaaatcacattggtttcagcaaaagactcatgtgacctttctaaatgaaaatagcatgatgctaaaaaaaattggagggaggaccatctctacatacagaatggtctttgcaatcaactaccatattgagaaaaaacttttattttttatgtttagaatatagaagggtttctgtttctcttttaattaaaaggaacgaaagtggtatttacattaaatgcaaatagcaccttctttcctacagtgagtgtttctcagaaatggacacattttcccttctcggtctccagaaaccccttgatcacaccaaaagagcaagtatggctttctgaaaatagaaaaattgtaggtaggttatacttacagtccctgaatttttgcacatatcgtaaaatggtgactagaattgttcaagatgtgttactccgttacacgtttacaaaggggctgaagagatatagatgttgcattttattaatactaaagaagaaactcagttataggaagtaacaggaaaaatgaatagtggtctgcatagtaacaatatcataatactgtaaagaagaaacattgcacttgccatttaataattgagaaaatctagagtgaattattttgagtaagatacacttactattaattttttctaaaatgtatttctctaactacatgttagttcaggtgaaacaaaaaatgagaatttaataaatgtttatatctgaaatataaaattaatatgtaaatataccttcttttgagatgacaggtgtacattctcggttgaaaagtaggtttctattttaaatcaagattaatgtatagtttatgattaatttaaaatataaatgttatatttcctctcatcctagaacagaataaaaagattttgaaggatttgtattaatcaaataagctagaagccacgcttttctaggaaaaatattaagagaaatgtaaccatgcttgacgctaggatggtgttaccatcaaactaaagcataatttcctctttctgtgactgttgaatactaatttttaaacattaggaattgtctattatactttattatatcatgactactcaatgttttgacatgaaattgtccctaatatatttgctaatatttgaaactagttcaaaattatctggcaagaaatttgtggctttatccatatgatgtatagcatgctagcttgtctatgcagaaggacaataattagacaattcagagaaggtgataatatttatagcttattatagaaatatatgtaaagactttcttgattgtaaacataaatattataaagtataactgagcttttgagattatcaggaaaccaaagtatctacaaaatctaaactttcactcaaacccatggtcagactgtcaatactaaattgaaaaattagactcctacacaagttgtgaagtttttctttcttcatgcatatgattacagaaaggcaggtatggatggcctaatttgtggaataaatccaaccacttttgtaacagctcagataacaaaaatcactaatagagaatgtgatattttatcaaattggctttgtttttgtttttattgtagcattgcataagatcaaagaagaaaataaatgattcaattaaaggaaaaatactgaaaggcaggacacagaaaaagagagttttagatgtggaattcttttgagagatcatctagtctgtttacagatatgaaatctggggaaacacagaggtgaattgtccaaggctttgcagttattgaagcatcaaaatcatacatatatcctgcttctaaacctccctctcagtgttcttttcatctatggttttaaaataatcaagtggtatttgttaagaagttagaattttaagatatggattatataaatccgatttatatggtcaagtttgactaatattagtaaatttgattgttagcaacataaacatttctggagtacctttcctataaaatacggatgacaatctcctttagcattgttattccgtctgggataaaaagcacttcccacatttatttagaaatgtaatggatgtgttcatttaactccaatgatataataattctctattgactacattcagtataacagtgatgtttatttggaattccccttggacttccacttagatttgttaaatatgaggtgatttgaatgacttaactaatgacatttgctcaatgtcttaagtttttcttgatagttggtaaatatctgttcatgatcaagagtgttacaccaagaatttactttcaatagagtgccatagatatcacttactgtgcattctctgtgtttatgtgtaaacatataatagatattcaaaagtaatataacctctccacattataaaataatgcacaaatataaagaaggataatatataagaaaataaaatggtgtaattgcacacgtgaggtgttctattttatgtcaaactatttcttaaaatcattcaaatatcttttaggttactaaaggagcttttgtcatatgaaaatcatatgaatagaccatcacattttgcaataagaagaaaaaaaaatttaactcatgaaatcaaaacctttatccaaaaccacctttgttcctcaatcttgtccaaattttgggtttttctaaacaagttttaataactcttattattttatatatttaccaaagcaatcagtctgtataagatttacattttagcatgctgttttttctctgatttatttctttcgaatcatcacatcaaataataaatcttaaagttgtcaattaaaattgatttcaaatgttttgtatctccccactattataagaactatattgtgaagtctatatcaaaatatagggggaaaagcctaaggtcgcaagtgaaaattttttttctaagacacattcaaaaatttgctaaccatttttgcatatctctaatttgccccagaccccaaattttaggataatgataaacttttagaatttgttaatacaatttttataattgaatatatcatatcttttttcaagtctatgttttttaataaacctgagagcaaatatttaaaatctcttttaaaagcatccaaatcgtaacaaaaagaactgtacagtgtaaacaatagtgtatgctccagacaaacaaagccttgtgatgtgaaataaagcaaatttgtgtataattaagcattaccagtactgttaaaatataggtttataaactggcaagaatatcgggaacatattctcagatattcaaatgcaaaaatggaaaatatttcatttttaacggtgaaattttctgctaactgtttacaaaataatatgtacttatatatagaaatgagtataagctattttcttttaatggctagtttctcattaaagggatcatgacattaggcatattaagagtttagtttggaaactattttaaaatattaataaagagctattgctaattaatgatgggattttccagttttatacatgaataaattactattaaaataacaaaaattgataactaagaatggggattagagtttgaaaaatttcattagtatttatggatttattggtttccctcattagagactagatgaccatcagagacggtgatatttttacttcataaccgcttatacctgttgtaaaatatcgagaggccatcagaattttgtcacttagagaagggactggaaatttttttaggtattcttttgccaagcatacttgctctatttaatggatgagaagtaaagctagacagattttcttcagttaaactttcaatatctccacagtctacagtacattaaaattcactcattgaaatttttttgtttgactctataatgataaatgtatctatttttagcattaataaaatggatgaagctttaactctataataaattcttccactttaaattctatacagcttgtctttccctgattctctagttctattaaattagtagaagtagttcgtgtcttcataatcaattgttatcaagaactaatatgtctaaataaacctgtagataaatgtccattcattattcttggtccataccaaagttccaattattatttgcagtatgtacctgacatatacatactaaaatgggttcaagtatagtttctcaataggaggtggatccttttattgatacataatagttgtacatattttgaggtcacataagattttgctgtgtttatgtaatgtataatgatcaaatcaggataattgggatactcatcacctcaaacccttaggagatggatactctcttgatgttcgatatttttagttttactttgattttatttttgtcatggcctcatttcaaactgactcataatccagaattatccaactaaatcataacagaaagtattattggctaaagtgaatcaagaaaaaatttagcattgttgctgtcatatacaaacatgtaagaagtttctttcacattttaaatataaatataaatgactgattctgggtttttcccttatgaggaaatacctaagcaacattaagctaagcaaataaatggttatttgtgtgatgatcttctaaatgtgtgtgtatgtatatattgctttaataaaaatttcagatggtatatcattttttaagtagcgaaattatcatagtgacttgtgaatagcaaaatgcaaaccaatgtggcattggatcctctccaggatgtgatgagtcacctgtcaccccccccattcaaccccaaatcccctacattctcagggaggactagttcttcctaaggctaacatgaatgccacatgttttaaagcaaagaatgtagaacatcaagttttaaatgtcatgtccattaatgagattagttaactgtccctttgcaagttcaaggaacaaagaaagccctgtggagagcagagagaagacagataggtggctgttaatgataagaggcaaaatttggtaaagggaaggcaacttaagctaaaggaagtgagtgaggtggatagaccccactaaaagacaaaaggagatagtacttaagaaaaaaatctgtcagtatctctctctggtagctgccttgtttttgttttgttttatttttgtttgttttatgctttcctgtaaatcatctcaaaatatctgactgtagcttcctctttcactcatttcattctgtaaattgtttctcaataccatgcctcttgaacacgagaaaacgctgtttctagcttcatcttcaagatatttatttccatttgtaaaaagaaagctgaaacatttttataggctacctcagagattatatactaacattttagtaacatgttctaaatgcttgagtagtttaagtattgacataaaattgctttctatttcagttggaattgtttgaatcctcagtaaatgtaaactattgtagctctaagggtatccccaactagaaagttcttatttcacacattaacatttgctgctttcttcacaagttaaactaaacatattttccttatttatttatttcactggaattcctttaagacattattttctcaagatgtggcccacaagccacctgcactgccaaccacaggttttctcagttggtatctctggggagaagaatcccttgatagtataaaaaatatccaatataccattatattaaaaaactagattggtcatatatctactgcatataacactgatggtcatatatctattgcatgtaacactatatacctgaataccagataaatgtagctcgggaaaaaaggtgaattatttcatgtagcaaggagtgcagaggtagcttttctgtcattggtttaggcatctcaatttcactccattccaggcagtccctggcagaaaaagaacaggatcaacatgattagcctggccaatcatgatttgttctttgggatgagtacattgcttgtgcacagtctcccttgatacccgaatggaattggagttctgttgacaaagaggaggaaactggatgggcaggtctagagtttatctggaatttgaattgtgcatttttagacatagagaaagaaatgcatttttagacatagacaaagaaataagtaggttttattatagtacgcactaacttaggtcagtttctatgtttctgtgactttcttaatcttacataattacctttatcttattaattaattaatttttatttttgctacatgaataaatacattcaagagggcacacaataaaatatagtaatatataattccaaagtacgggctcagcaagtagaaaaaataaacaccatgatttgaaagcattgatgtaaaacttgatctttaccattgctaattagtcagccagaaaatatatataggaaatggcttagccctacatataaaatgtgattctcattcttagggttatctatgcatcttttatctggtactactttttatatctcaatatttgacatcttttttgccccatttcaaaatataaatttatttattttctttacaactgcattcctctgcacaaataaaaaatatataatttagaatatatagtagagttttgataattatatttatattttaaatggttttgatatgaatagttacttctattctccacctgtttaacaaatttgatatttggaggcaaatttccatatatttgaataaatatgatagttaagaaagcattactttctatttgccaaaacttaccttgaattaaaaatagacaatacgtatttatatatgtgtttgtatatatgtatatatgtttgtgatttgtaatggttttgtatatgtgtgtcttctaatacaagggtccccaacccctgggccaaggaccggtactggtctgtggcctgttaggaacccagctgcacagcaggaggtgagcagaaggtgagcaaacattactgcctgagctctgcctcctgtcatatcagtggcagcattagattctcataggagagccaaccctactgtgaactgcgcatgtgagggaaataagttgcaggctccttatatgaatctaatgcctaatgagctgaggtggaacagtttcaaccccaaaccacaacccctatacccccagattttcacctcccccaaacccctgtctgtggaataattgtcttccacaaaactgttccctagtgccaaaaaggttggggaccactgttctaatacacacatacacacacatacatacatacaagtgtacattgatatatatatatatatatatatatataatgaatagtttactactatgtgggctattatacagaactgaaaaaagaaccacaacaacacaaaacaatatcgatgaatgttagcagtataatatccaaagaaaaaaataaatccaacattataattcaaaaaacccaatattaaatccaataaatttaataaaaatgtcagatggtgcattctctgagtacagtatcccttgatacctgaatggaacatactacatggtaaatatcatctccataaagccaaacatattgaaaataaaattttagtctttaggaataatatgtgtgtgtttaataaacatataaaaagaaaagaaatgatgaagaaattattcaaaactgtgttacttcatttggggagaggtagggaatgtttgcaaaagtgcaacatgattggacataggttattttcaattccttgcatttttgcaggagtaaggagtgtttgcagctgtttcctacgttgttaaaaatgggcaggccaagagtgcaatgtatctttaacataatgtcgtaagtaatatcccaatcaaatcaaatttatgtaagtatgtcttatgaagtaaatgcaataatgatatggggagcataaatgctacataatttgaatttaaatgagagcaattggccaggcatggtggctcatgcctgtaataccagcactttgggaggccaaggtgggcagatcacctaaggtcaggagttcgagaccagcctggccaacgtggtgaaacccggtctctactgaaaatacaaaaattagccaggtgtggtggcagatgcctgtcatcccagctactagggaggctgaggcaggagaatggcttgaacccaggaggtggaggtcgcaatgagccgagattgtgccattgcactccagcctgggcaacaagagcaaaactccatctcaaaaataaataaataaaaataaataaatttgagcgataataaagggtggttatttgggctttgtatggaaagttacttattttcatacagctttctatacatacaaatttctgtcaataacaagattgaagaaacatagagtaataaatacaaccctctgcattctgcaattttcctaattcaaagttacattttcacatgctgaattgcatttattggctttatgtttaatactaagcttggcacatactatataccaaaaataattttaattttcaaattgttgattttttaagttgttgccaatgatttatctaatttgctcatgattctggatcaatcatttctgggttgtttcagcaaatcgttaagaacatatctaaattagagttatatattattatgtatagctgtatcatttactgaggaattactaacaatacttttcattttctagataaaattcaattgataggataattttctcttcctctggtaattatgccataaataagcatacttctaacatttattcctgtgaaagatggagagtattttttaataactacattcatgaatgtcactttctaattttcagagtttctggtctgtaaaaaaatgacaattagttttactaaaaataaaatgtgagaataaaaatgggtgaaaaaataaaatagagcacacaacatactcctatctgtgaaacttgtttttaaaacaaaaataaaataatgataatttcctcatagaaaaaaatggaaaattaggatttttaggtgaaaaattaaaagttaattttcttagaaaatattatttattctcgcggccaggcgcagtggctcacgcctgtaatcccagcactttgggaggctgaggtgggcggatcatgaggtcaggagatcgagaccatcctggctaacacggtgaaaccacgtctatactaaaaatacaaaaaattagtcaggcgtggtggcgggtgcctgtagtcgcagctactggggaggctgaggcaggagaatggtgtgaacccgggaggcggagcttacagtgagctgagatcgcgccaccgcactccagcctgggccacagagcgaggctccatctcaaaaaaataaataagtaaataaataaataaatacaataaaatattatttattctccattatgagcatgagtcttacagtatggcaatcacttgtatttatacagaatggacataaaaatgaatattttgaataaccaacttaatttgagagtaaattttgatataacttgtcatagttatgtaaattattttagggtagttgataattgtgttctatgaattaaattcaactatcatgcaacccagtcttaatttaccaacataaaaatgcttatagcatttgttagttaataaatatacttcatttgcatctacagctgtgcataaaatcactattcaggatgagtcacatatatttttaaatatctatcacaagtagttagtgcaaataacttaaaacaaaatatattttctgaattagagtctatgagaaattttagccacattaagtagaccaatttgggattaaataacaataacaacaatgataataataatttatccattgaatgatatttacaattggttttatagtagaacaactataagatacaattttcaatacacttctcattcttctaaacatatggagtacagaagttaaatatattctaggaattgtactaacagagtattttatatttcaatctcaaaaattaaaaatatttccccaaagctaaatatgataaattttcaataggcaaattgaatgaacatgtatttgctactaaattttaagaatataagaaacaaaatatataagaaaattcaggttatctgttacattgtaatgcttgtaatggatgtgacggataggattttggttagtttatcaacccctggctgtcttacttaaaggactgattcggaatataaaagtttaactacatgtgatgtgacttgagtattgctcccaagctacctttaactggactcaaggaagaagaaaccatattcaactaaaattgataaaagttcattttcaatgtagaataattcatttatcattcagtgttcttgaagcagtttaaggctttgtttaagtactaaaacagagtttgaagaccgagataattggccgggcatggtggctcatgcccgtaatgccagcactttgggaagctgaggtgggcagatcatgaggtcaggagttcgagaccagcctgacaagcatggtgaagccccgtctctactaaaactacaaaaattagctgggggtggtggtgtgcgcctgtaatcccagctattcaggaggctgaggcaggagagtctcttgaacccggaaggtggacgttgcagtgagctgaggtcgcgccaccacactccagcctgggcaacagagcgagattccatctcaaaaaaacaaaacaaaacaaacaaacaagcaaaaaaaaccaaaaatgaaataatttctctaatttcatttaatgcctgagagaatgattcttatgtataaatttttaaatggctacttatagacattgatacaattatactttattctgttcatcagtgtcctaaattgtcaagtaacagaattcactatctctagggtaaacagtaagggccacactaaagataatatcaaagactcttggggagcagaagaattagaaatggtggcaaagagctaggagcaacattagaaacacaacacagccaggaaggcaacgatatcactggaactgtataaatgaaacaactctgttgccactgttagcttgttgaccctgatgatgctgaggactagatggcagaatggtcaccacagcaaccccagggaggcccaggtgtgttctgcactggccagattagactaaatgctcactgcctcaggctgtttagtactgtatcttaatatcacatcaggacatttgatcagtgaaacaagtttctcagatattccaccttgaaaaagcaggattcataattgagcatctatcaaatgtaatgtacgtatttaaaaacgattaggtcacaaccaatggggatatgtactacatttcattaacatatattgaatactagttcaaatacttctaacattaattcctagagtattaatgtaacatgtcagtatggaaaaaaattccttcatgaaccctgaaattaaagagtctacagtttcagttttgtagtgttcctagttacagaagctagatttttatttttttacaggaaaatacattaggttttgggtacaacatagatcatattgttattcagttttcattctgttcttaatggattacaaaaatatgttcagtttagcaaatttttctttaaaaatgtggaatcatgcaaaactcatcaacaaagttgtaaatttacaagtattacttctatgatacaaagtagagtctactgactatttagaagtagccactgcattcatttaaactgagattctagcacttcatgcaattctgttaaaattcatagttgttttggccagccagttctctagactgaggcccatacttggacttcatcacaaatcattcataacttcagcagaacaagacaacaacacagaatagatctagttcaccttctaaattttccttttattttttggtaagtgaataatggaaaaattataggtttagtgactgattattaacaaagaacataaataaatgcaacatatgtagttttattaatttcatcagttttgactattcagagtgagtgtttctattcactttccaattaactcccagctttttcctaagaatgatatttcgggtagtgatttttctttttttttttttacttttcagagccctgaaaaaatagccattaacagttactttaactatcagtacaatgtataataaactagtcttattgaaatgcattagtttaaaacaatactgaaggagcaaaaatgtctatatttaaaacctcactccagataaacagacttctgttgtaataaaagttaagctagcttattttatgtttaaaaatatggattaaatcatgaacaggaaggaagtcacatatttgaaaatgaaatatacaaatgatgtgcttttttaagtggtagcaggaagaatatgccaaaaagttgtgtttaacccatttctcatgatacacttagaaaagttatttaactcacaaataaatgctgataatttgtttcaaaagcattttatgcatgacttgaagacactagggcttgtcaatatatattaattgtatagcaagttataaaatgaagcttcattgaattctattaggtcacatcaaaatacactcctaccagataaattcttccatttcgttttgtttctatggcatttgggaagctcagctgtgctcaagaaactctgttcctgtaaacaggttagatattaatgtcttctttattagtcttcaagagaagtaaatctgagaccttgcctactcagttaaaaaactacgaatcaaatcaaacaatttattcacaattgaccatttcggggaaaatcaaaccaagcaaaaggatcatttgaaatcaaataactaaacttgcaaactcagagtagaaatagcttgagttgaactcagccttaaaaatatttattttacttttttgttatgtacttgtatttgaccaagctaacctgataccatccttatatagttctgagcaaactggtatagatatccatttacttttttcagattttatcgtaatcatattgttttcggaatcctttaaaattatataaaaagcagcaacactttaattttgctgactttctcacttattaataagatccaacttatataatcagctgtctataccagtggttgacagaagtatggcattttcttcaataaagcaagaattatactggatggggaaaagttgaaagcttttcctctaagatctggcacaagacgaggatactcactgtctccacttctattcaacacagtcctggaagtaattaggcaagaagaataaacaaaaggcatccaaataggaaaaaaagaagttaagttatccctgtgtgccgatgacataatgttatagaacccctatttttatttttaaaaatgttatttgtatatatttaaggaatacaagtgtaattttattttagggcattcatcacctgaataatatgcattgtacacattaagtaatttctcatcatacaaccccctcccatgcctccacccttctgattccccattgtcaatcattccacactctactttcaaatgtacacattattttgctcccacatgtaagtgagaacatgcagtatttgtctttcagtgtctgaattgtttcacttaagataatggcctccggttccatccatgttgttgcaaaagacatgattttattccttttgtggctaaataatgttttattgtgtatatataccacattttcctcatccaatcaacttaagtaaattctatatatttgctattgtgaatagtgctgcagtaaacatatgagtgaggtatctttttaatataattatttcttttcatttgggtagatacccagttgtgagaatactatatcaaatggtagctctatttttaattcttagagaaatctccattctatttttcatagatgtactaatttacattgtcaccaaccgtatttaagcattgtcttttctccatatccttgccaacatgtggagatttttttgtttatttgttttttaataatagccattttgactggtgtaaaaaattccaccaaaaactgttagaaataataaacaaattcagtaaaattgcaggatacaaaatcaacatatcagtagcattcccatagcaatctatctgaaaaagaaatccagacctgaaactataaaaattctagaagataacattggaaaaacccttctagacattggcttaggcaaggatttcatgaccaagaacccaaaagcaaatgcagtaaaaacaaagataaatagctggggcctaatgaaactaaagagcttttgcagggcaaaaggaacagtcagcagagtaaacaaacagacaacacacagagcggtagaaaatcttcacaatctatacatctgacagaggactaatatccagaatctacaatgaacacaaacaaatcagtaagaaggaaacaaacaatcccatcaaaaagtgttctaaggatatgaatagacaattccctaaagaagatctacagatggccaacaaacatatgaaaaaatgctcaacatcactaatgatcagggaaatgcaaatcaaaaccacgatgtgataccaccttactcctgcaagaatggccataatcaaaaaatcaaaaaacggtagatgttggcatggatgtggtgatcagggaacacttctacactgctggtggggatgtagactagtatacaaccgctatggaaaacagtgtggagattccttaaataactaaaagtagaactaccatttgattcagcaatcccactaccagatatctacccagacaaaaataagttattatatgtaaaagatacttgcacacacaagtttacagcaacacaaagcgcaattgcaaaatcgtggaaccaacccaaaggcccatcaatcaacgagtggataaagagaaactgtggtataactgtggccacaaaaaggaagaaattaacagcatttgcagtgacctggatgagattggagactattattctaagtgaagtaactcaggaatggaaaaccaaacatcgtgtgttctcactgatatgtaggagataagctataagaacacaaaggcataagaataatacaatggactttggggacttggggagaagagttgggggaggcaagggataaaagactacaaatacggtgctgtgtatactgcttgggtgatgggtgcaccaaaatctcacaaatcaccactaaagaacttagtcatgcaatcaaataccacctgtaccccaataacttagggaaaataaaaaataaatttttaaaaaatcccatttacaatagctacaaaaaatacttaggaactggccgggcacggtggctcacgcctgtaatcccatcactttgggaggccgaggttggcggatcacctgaggtcaggagtttgaaaccagactgaccaacgtggtgaagccctgtctctactaaaaatacaaaaattagcctaatgtggaggcacacacctgtaatcccagctacctgggtggccgaggcatgagaatcgctggaatccaggaggcagaggttgcagtgagcagagatcatgacactgcactccagactgggcgacagagcaagactctgtcctctgtccacccgcccccacaaaaaaaggaataaatttaaccaaagaagtgaaagacctggaaactgtaagacattgatgaaagcaattgaagaagccacaaataaatggaaaggtattctgtgttcatgtattggaagaattaatattgttaaaattcctacactacccaaagctttctacagtcaatgcaatctttatcaaaacaccagtgacattttttacagaaattggaaccacaaaagagcttgaagacccaaaataatgttgagcaaaaagaacaaaactggtgtcatcacactacttgacaccaaaatatactacaaagctatggtaaccaaaacagatggtgctggcataaaaacagacacatagaccaatggaataaaacagaggccagaaataaatccacagaattatagccagctgattttcaacaatggtaccaggtatatccaatgcgaaaagaacaatcttctcaataaatggtgctggaaaaaatagatatccacatgcagaaaaaattagacccttatatcagaccatgtacaaaaattaactcataatggattaaaggcataaacgtaagacctgaaactataagactaccagaaggaaacataagggaagtctccatgactatgatctgggcaaaaattttctggatatgacctcaaaagcacaggaaacaaaaccaaatatagacaaatgggattacatcaaactcaaaaagttctgcacagtaaaggaaagaatcaacagagtgaagagaaaacctacagaatgggatgaaatatttgtacaccatacatcttataaggggttagtagccaaaatagatcagtaactcaaacaaataaatagcaagaaaacaaataacccaattaaaaatgagcaaaagatctgagcaggcatttctcaagagaagacattcacatagccaacaggaatacgaaaacatgttcagcatcattaaacatcaggtaaatgtaaataaatccacagtgagatatcaactcaaacctgttagaatgacatcaagaaggcaaaagataacaagtgttcctgagaaggtagagaaaagggaacccttgcacaccgttggtgggaatgtgaattaatataaccattattgaaaacagtaggggctttctcaaaaaaattaaaactagaactaacatatgatccagcagtcccactactggctatataccgaaaggaaatgaaatcaacacgttgaagagatatctgcacacccaagtttattgcagcacattcacaattgctgagatatggaatcaacctaagggtccatcaactggtgaatgaataaaagaaaaaatgtggtatacgtacacaatagaatactgttcatccatgaagagaatgaaacctgccatttgcagcaacatgaatgaacctggaggatattaagttaaataagccaggcagagaaagaaaaaataccacgttatcttactttatgcggaatctgaaaaggttgattttaaagtagagaataaaatgttggttaccagaaggtgaggtagttaagagagagggaggattatgaagataacggttaaataatacatatttacagttagatatgagaaataaaatcaagagatctattgtacaatatggtgactatagttaatgatgatacggattgagtattccttatccaaaatgcttgggacctgaagtgtttcagatttgggattttatggaatgcttacatatacataataaggtatcttgggcatgggacccaagactaaacacaaattcacttatgttttcctgcactttatacacgtaactttgaggtaattttatacagtatttttagcagttttgtgcttgaaaaaaagtttgcattaaatacttatatgtccaattttccacgtatgacatcatttcagtgctcaaaaagtttcagattttggagcatttcagagtgtgtatttttggattagggatgctcaacctaatttttttcaaatgaaaaatactaagagagtggatgttaaatgataacatgtgagggaatgcatttgttaattagctagatttaaccatatcacaatgtatatgtacttcaaaccatcatgttgaacacaataaatacatacaattctctatgttcatttaaaaaataagcttgaaaacaagaattttacaagtttgattttgattctggatttttttaacttagatgcagacatattatctgatcagggcgaacagaatttagcaaatcattataaaatctttttgaaagtaataaaggaataagtaaaggtattgccctccttttttttccttaggaaatgtttagattggtccttagctttgtttcttgttacacctgtagaatatagctgttgcatacataactgtgtctaaataatctggggttcttgttaaattttagagtctgtttcagtaggtttggaatgtgcctgacattcgacatttttttttttttttttttttttttttggagacagagtcttgctctgtcacccaggctggagttcagtggtggctggagtgcagtggtgggatctcggctcactgcaacctccacctccggggttcaagtgattctcctgcctcagcccccagagtagctgggattacaggcgcccaccaccacacccagctaatttttgtatttttagtagagacggtgtttcaccatgttggccaggctggtctcgaactcctgacctcaagtgatctaaccccctcagcctcccaaagttctgggattacaagtgtgagccaccacacccggccagtattcaacatcttacttaacaagctcatatataacggcgatgctgttaattggtaagtagcaagggtgcatgcaggcaaagttttctcagtattgatggaagccctcacttaaacctagatagcatttaataatttgggttattggtgtcctatcctttacttagcagatttttaacatgtcatctggtaaccatggtaaagattatgatactaaaagcatatgttttagggtttaacgtcacaggactttaaaatctcggttatagctttggacaaaaaacttactaaatctcagttttcttatctgcaaaatgtgaataattctacttacacaatactgtgttaatggtttattcaatcacaaaaagcatctaaaatgccccacaattatcatgtgaatttagaaatactagattccttctacacatctacacacagacacacacattaacacacacacacatacacacacaaacaggggggagagagggtgctgtataaggaatccacaagatatgcaaaatgaatctggtatttctaaatatgcatgatatttgtggggcagtttagatgcttcttgtgttttaataaaccatcaacccagtattatgtaggtattatcacttgtgtgtgtgtgaatattcagacacatcttttttcaacatcttcaatgctggagcattgtgtgagctagaacccagctaagagagggaggtcttcaaagttgtaaaacatatgtgctcaagtgagtacaggcatcaaaatgaattcaagagtaccctttaaaatgctgcatgtcatatacctggttatggcttttgggaaaaattctaatttagatccctttccaagtggcacaccatagtgctttgcaaatgatagactcaagaaggaataaatgtattccggctgaaagttttgtcatgggacaattttatgttacataaatggaaattcatttggaagtgacagggaggttaattttaaatcaattcaaaagctatgaatcccttttggcaactattatgtttagtttaaaagaactctgtaggcttattatagataccatgttaagcttttgttgtgcacgtatatgggtgtgtagttcacattctcagtttttattactaaatttttcaatacaaaaattaattcattttaattgacaatcaagtacaagatatatcaaaatcgagcaatacatattttcattttgtatgaaatgtgatgtatatcgtgaaaaaattttaaatgagaacagtaaggttttctatatttttaatatatccgtgcccacttcacaaatagaaatgaaatgccataatcttcatgtatgagaaatattaagttcattcctatattcagttgctattgcccagtggtatgaaagtcctacctcaaaaaggtgtagccaaagaaagataactggcggggcactgtggctcgtgcctgtaatcccagcattttgggaagccaaggtgagtggatcacttgaggtcaggagttcaagtccagcctgaccaacatggtgaaactctgtctctactaaaaaaatacaaaattagccgggcgtggtggcacacgcctgtaatctcagctacttgggaggctgaggcagaagaatcgcttgaacctggaaggcacaggttgcagtgagccgagatcgcgccattgtactccagcctgggcaacaagagtgaaactccatttcaaaaaaaaaagagagaaagaaaaagaaagagggagggagggagggaaggaagggaggaagggagggaaggagggaggaaggggagggagggagggaggaaaccaatggcgtgcgttttatattatttggaaaccttatatttgactcctctaaaattcagaaatggttttatattgtacaaccgtttccctcaaatatttggtaatggggctgacatagtctatccttacttcaaagtagtctgggtttttgctcgctggatgcatgaacatgttgagatatttaatcactacttcttgtgtcacacttccctctgtcacagttggatggggaatgagctgataaaatatacataattaatagataaggtacattgaataatattacaaatacatgtaactggaagaacaataacactaccacccggtccttccccactagcctcaccatttgggagtttttgctaggagagaaaagtggttaatcctcactagcttctcacctcagagattacagatcattctgccctggtgtttgataaggcctccaaaataaagcaaaaagcttctgccagctttttgtgtaggcaaagtgtagtcatctttgtggtaggtggttctgtaaaggacctgctatttacgcctctgttccccaccacaccccacacccaggaaacaacttgaaagaggaaggagagtccggacgcggtggctcacacctgtaatcccagaagtttgggaggccaagttgggtgggtcacttgagatcaggagttcaagaccagcctggccaacatggtgaaaccccatctgtactaaaaatacaacaattagctgggtgtggtggtgcatgcctgtaatcccagctacttgagaggctgaggcaggagaatcactagaacctggaaggctgaggttgcagtgagccgagatcgcgccattgcactccagcctaggtgacaagagggaaactttgtcaaaaaaaaagaaaaaaaaaaaggaaggagaagccaaatattggcactcgttttgcttaatactataacggacaggcgcagtggctcacacctgtaatcccagcactttgggaggccgaggcgggcggatcacgaggtcatgagatcgagaccatcctggctaacaaggtgaaaccccatctctactaaaaatacaaaaaaattagccgggcgtggtggcaggtgcctgtggtcccagctactcaggaggcagaggcaggagaatggcatgaacccgggaggcggagcttgcagtgagccgagatcgcgccactgcactccagcctggacgactgagccagattccgtctcataaaaaaaaaaaaaaataataataataataataatataagttggccagcttggcaagttttgcaaactttggaaaatgtttctcttcctcactatgaattagattaggctgtccttgctaattaatggggacccatgggagatggcgctaatctgggaggagcagattatattctaagggtacaggctcttggatcaggctatctgggattaaatctaccattgactagctgtgtgaccttgagcaaccttgaggttgctaggtgtgtatcacctctgagactcgattgtgacatctataaaatgttgataaaataagtccctaaatgattaaactgttgtgaaaactatattgctgtatgtcattgaatctaagaaataataaattgcaagatagaccattgttgtgtgtaggactaacaaattaaaaaacaggatacccctaaacgctatacactaatgattttaagacatattgattttagaaatgttaaaatgtgaaatgtcatctcagaatcaattaaatacagtagttaattctgatgagttgcttagatcaatacttggcatatagtaaatgatcaatgtttcctattatggggtggaatttccctgaaggaaggcagtcatttctagcttgaaaatggaggccttttagaaaggaagcccatagccttcaataggaaagagtaagaataggaactggtgcgtgctcacaaaaaacgttgtgtaggggttaattttttcctgcttttctgctacacaacacaagaccaagccattgttagtatagagtttggcctttctccatcccttaacgtaattctcttagttacccccaatcccaaccctccagtaaaggccagtattcctacagaactctctgatggagttgtggggactataagggtgagtagtaacaggaggagagcctgttccatgtttggtgtggggctgaagcccatgctgaggggcagcagcacactaggaagagccattgtccagtaaatggacaattgtccagtaaatccatgtggtgacaagcttagcgaacagtggcctgggcgaaagaatcactgagagtggccaggagggatctaaacccagagaagtgattacccaatagacttctgacttaggagtaaatgtgagaagcaaaatctcttttcccagaattttacaaaaaatcgactcttggaatggcagcggtggctaatacttaggtcacgtagatgataaaattataagacaatatacataatctagactgctgttcattgaatcatgtcagtgtgtttgccacatttcttctaaaagaacatttttcatattttatcatttctgcaatcagtagtagtaataataatatctaacacatacaacttagtatgttctgggtggtattctaagtgcattgtcgatattaagtcatttgtaactcagtgagttagcaacagttgttatccctcatttaacaattggggaaactgaggtgtgaaaaattttcttctccaaggtgtcacacattcacaaatacacacagacacacacacacatagacgcacacacaaacacacacacacacccatctattaagtggtagaggttggcagcatgatcctaaccgttgcatgctcatactattttacaagaccatatgatctaaaatctattggtagcttagaatttatgtaccgctaaatatgtacatctattgtgtactcacaaaaattaaaaataaaaaaataatttaggatatctgttatggtggttaaattgtgcctgcagtgcaattccaatctaccttcctgcgtcctgggaactctgaggaccggtatagagcaatgacaggaagcaagggctctggcttcatatctgcattggaatccaagctctgacacaagctaagcaagcttgagaaactttttaaaagttaaacattttattttcaaagagttgtagagttaagaacagttgtaaaaaataatataaaagatcctatgtgaaatatcctgtgtggcttttgctcggttatccccaattgtaatatcttgcaaattatattcaaacattataatgaggattttgttacaattaacctctctaattcagattttcccagttttacctatactcatgtgtgtgtatatatttagttaaatgcaatttttacacatgtagattagtgcgtccaccacgacagtcaaaatacggatgttacatgaccacaaagatctctcctgttgacctttaataaaatcatcaagcttcctcttgtcaccctgtcccatgcctaacatgtggcaaccattaatctgttcttcatgtctataattttgtcatttcaagaatattatgcaaatagaattgtatggtatttaatcctttcgaactagcttttttcagccagcataattgcttaatgatccatctaaattgttgcatattgcaatagtttgttactttttattactaatatatgttgctgatttatttatggttgtggacatcctacagtttcaccattcactgactgagagatattgttgtttacagtgtggggctgttactaataaaattgctgtgaaccctaatgtacaggatttgtgtgaacataagtcttcatttctctgggataaatgcccaggagtgcactttttggactataatggtagtctcatatgtcgtattgatgttgtcgtttatttttaaatttctttttcattgacaattaatatttgtttgtatttataggttacaatatggtgctttgatatatgcttacaatgcagagtgattaaatcaggttaatgaatctgttacctcatattttttttgtggtgaaaatattaaaatccactatttcagcaattttgaaatatatgatgcattatgatatattatagtcaccatcatgtacaatagatcactaaagcttcttcctcctacctaactaaaaattcgtaccctttgatcaacatctttcttttcccggtaggacccttccgccatttctgtggtaatcttcattctaatctgtatttctatgagttcaacttttttagattctgtccatcatcagatgaataaataattaaaatgcagcctccacctgctgggtttaagcgattctcatgcctcagtctcttgagtagctgggactgcaggcgcccgccaccatgctcggctaattttttgtatttttagtagagaaggggtttcaacatgttgaccatgctggtctcaaactcctgacctcaagtgatctgcccctctcggcctcccaaagtgctaggattacaggtgtgagactccgcacctggctcctttagcttttaagaagagaaagaattgaaattatgattacaaccaagtgaagttgaacttgaactcctaattagaggatggttctgatgttaatttacgtaaaggaattgtgatttttgtttttctgctcccactccaatccgttttttcccacacagaatattcccaactcttccttcttgaacctttgtaacattactggcattcgtttctcttatccataagctctaatcatccaatgtttcttcttgctgttattatattgaacaaatatttattagatcaatcaggaataggaagaatagataattttgttttactttcattttttccttctctaatgtacttcctttctttatgtagatctaagtttctgacttacatcattttctttttctctgaagtccttcttttgacatttcttgcaaggcagatctactggcagcaaattccctcagcgtgtttgtctgataaagtattcatttctcttttacttttgaaggataatttcaccaatacagcattttaggttggtggatttattttttctctctaaattttaaatatttcagtacactcttttcttgctggcttggcccaatccattttatgctcttttttgttctgctctgtcactgtgaagctgacccctataaattgcatttccttagctcccttgccgagtagtctcctgttggttttggccaatggaaggcataaacataagacagaaaggcagaaagagagcagatctgggacattccttttacattgacctccactctctttgtgccttatttcccaccatggcagcttatatctctaactatcctgttaagaatctcctctatggctctatctcttactggatttagaaaatcctacttccttcacttgactcttcaggcatggtaaggctgggaaaggtatatcacaattgcctactggaggttgtctctaggtgcctcgatagccccttttggtttctttaagcccattcacacctctgaaagtagttcctttgtactgttttattgaaccatccatgttgaattctatttcttgccagggacatggctgataaagggagataagaaaaatcagtaacttctccctttgaagtaacaaagtataagatgaaagtaaatgaaactcatagttactttaagaaaatgcgtttgtgtatatataaacaatttctacttttcatgactctatctggtggtttttagtataaaatactcactagaacgtgagattaaagtttgccactccatactgatttgcatatggactgttcgctcaagaagtaagggttgaagaaattggaacgacttatcatttaaatcaggaatcatatgacaattcaactggtgacaatgtgccctactttctaagagcccaagttgtacatatgattgcttgtgtatgtatgtgtaagtcactccacgcacatatgcacgtcacccttgagttctgagtttacaaaactaaactaaattcagttactaaaaatatcaaatttgtgtaattttcatgtatttctatgcaagcacatcattactgaaaggccctattatactgttgcaaaatactcatgaagtaccaaggtgcctgattccaactgttatttatttttttttttttttggctattatgttcctaacatagcacataaactagctcattttctcatggtacttaactaaggatacttttttaaaatctagagtattacagggtctttgcatacctacctcttaaactgatttgttttggattctggaaaacttagcacgttggttaagtggctgtgaagaaattttgatgtatacgtccacctcacatagacctaatagctatgtgtttggctagtattttgtggaaacaaataattaagagcaagaaaagttggatttccttaagaacactgaatcgcatagagattgggtaattactggagacaaaaaggcctgtcaataaaggtcagatatatgcaactccctccttttgctgaaaatctattattccatgttgaattagatattaaaagaatattatactttccaataattatattgttataatgcaggggatatatttctcaccaatgactctacatccacaatgtatgatgaaataaaatatatatttatttttaaaaatgcctttagggttttaagatacttaagaattcatttcttgttcacttttaaatttagtgctcttagttctaagagtttgtcatctgttttatgatacaggttaatactgcaatataagcaaggaccagtcttcattttacaacatgtatcataaaactgtaggctaaagaaaagtaattaaaaaacactctgatgcatgactttaatgtaattaaaatatattttgcattcatgaaaaattacaggtctctatcaatccctctataaacaattataatcttattacttaaaattatttcaacatcatacacatatggtgtatatttagctatagtcgtttaggtttttaaaatctgctttcttttctaaatcataattttagaccttttgctatgttcgcaatctttgtgtaatcacatgcatagcagacaatagcacattgtaagtatattagaaatatgaaaacacagtctaatctcaatgcaaaacactgttgaaaaacacagcatgataaaaaattaacttataaatggagagatatactctgctaatggattggaatactcaacatggtaaagatgtcaattatctccaaattaatctatagttttaatgccatttctactaaaataccagcaaggtctttttagtagacttggatcagcttattctaaatttatacggaaaagtacaagcctgataatagctaatacaatcttgacaaagaagaataaagtggaaagaatcactccactaaatattaaggcttattatgtagctacagtaatcaagacagtgtggaattgggggagagatagacgcatagttcaatgcaatagaatagagattccagaaatagacccgcacaaatatgtgcaaactcattttttaaaaagttgtgaaagcaattccaaggaggaattttaacagcctttccatttctatagccttttcaacaaatagtgtgcgttttttctaagtgagtggtgtttgagcaagtagacatctaaaggcaaaacaaacaaagcccacccataaatatataagtaaataaatagagcctcaacttaagtcttatgcaaaattatctcaaatgtcaaatataaaacataaaactacaaatattttagaaaaacatatgggagaaaattttgtgactgaggcaaagactttttacactttacacaaatagcacaatccataaaaaagaaaaactgataaattggacttcgttaaaattaaaacttttgatctgaaaaggatcctcttaagaagtgaaatacaaggtacagaatgggagaaaatatttgcatatcagttgcaaaaacagggactatatacgaagaacttagaaaactcaaaagcaaaaatccaaaaataaattaattaggaaatgagccaaaggcacgaagagacattttactgaatagtatatataaatgacaaacatatggaaaagatattaaatatcactagacatcaagcaaatataaattgaaaccacagtgagataaaactacacatttttcagagtgtctgaaataaaaaatagtgacactaccaccaaataactagcaaaaatgtggagaaatgggatcactcgtacattactgaaaagaatatcagtctggaaaatagtttggcagtttgttaaaaataaacaaacactgtgtatgtttaccactccagcctgggcaacagagtgagaccctgtctcaaaaaaaaaaaaagctgaagaaaaatttttttaaatggggaatataggtggaagtgagagcctgatagcctaatatactttatcttttctaatgtatttaactgctgctcttatcattgcttctatttaaaaatgtattatatttttgctaaccaaccttctaggagccaattgtactctcagatttccccgttttcatactgaggttttatcgaagtagcccttctccaagtccctcccctttttattttaaatatagagattttaaactatttctaatcttactctcttctccaagttcctgaaggtattacctcagaatatgaaaacccttaaatgtacctcatttgctaacgtggagagagagacatgtaccttggaagataatttgtgatggaaaaagcatatgcctacacacacacacacacacacacacacacacacacttaaacttgggttcaataacatattaaacttgggttcaataacatcatacttctcaatattccaaataaagttaactctaaagattcaccataagattttcaatattttaaaaatgtttaaggaaatataaatgctttaggttgtttaggttgtttagacatctattaaacccagaatatactttaagcactaatctttaatatactatagattaaaagctatctttcaaataaccagacttcacaatgtttaaacattttataaaactgaacagaattttgagacataaaccaatataaaactttttttatcctcctctaaattcaatccatttgtgaaacctcatttaaattcgaatcaaatattttctctgatttccattaacaggctctgactctcaggcttcagtgagtaagtatattcattgtggggctcagaaaattttgaaccaaattataaatggtgtttatttgtgttttctttccatttctttttaaggcattctgtagtgaggtattcaaaacaggatgccactcaaagactctctctctctctctctctctctttaaaaactattagagaaaatagcatgtgcagcttcatctgctacataaatcctctcaaagcttctctcctttccagatgatttgagttgtcaggaagcaaatgaagcttaagcttttgggcccctttatttcatagaagtcttcaaaaatatgtgcagaactttcatataatcacgtgctcgaaaaatatgcacaactaagaatagcctcgagctttaggcaccgcaatcgttggatcttctgttcttatcaattcttaccaattgtttcttaggatgacacattaaaccttcagaaaaaccttatcaggatgaaaacttagccttgccatggaaaaaaatggtggttttaagaacagagtaaaaaaataattctaacagggaggggatttttttcttttgcttttttaaagaaagaaattaggaaaggattttaatttgagcctacaagtttgctgaagttgcactctaaaatgtcatccacatagatttatattgttttctttactctttcttgtgtagtaataacttggtctaggctttcaataaataaacttatgaaacagttttgagtattaacaataacacaatggcactgagagcctgtttttacaagactctaaatattttatttaaacgatacccagaattctgatttgcatatttaaaattttcctgaattagataattcttttaagtgtgttacgttatataatctagttgcagtatccttttaacaaaaaaaagcaagtgcaacagtgttaaacatgacattgatgccacctaatctccatcaggcttcacaatgtagttttatcttatatttatttgtatgcacgaatgtcagtgtcgtatggcaggagtctgtaaactttggctcataggctaaacccagcccactgtcttttaaaaaaaaaagatagatagataactgtaaattcacatgcagttgtaagaaataatacagaaagatcctgtgtgccattttacccagtccctccttaaggtaaagtcacagaactatagaacaatattacaacaagatattgacatcagcacagataaaatacaggatatttccatcaccacaaggatcactcatgttgccctttcatggtcagacccacttttttcctgccctcaggcactccttaatctctagcaactactaatatgatctctatttgtataattttatcatctcaaaagtgttatgtaaatgaaaccctgtattatgtagctatttaggactagccttgttcactcagcataattctctggagattcttccagatttgtaatgtgcatcaacaatgtgttcctttgtactgctgagtagtattccatggtatgaatatgccagtttgattaaccatttgcctgttgaaggacatctgggttgtttccagtttctgcctattacaaatacagctgctatgaagactcatgtacagtttttttatgagcaaattttcatttatctgggattaatgccatggaatgaaatttctgggctgtaggttagttgtatgtttagttttttacaatgcaccaaacttttacagagtacctttaccatctcatgtttccaccaacaatgtgtaagtgatctcatttctctgcattcttgccagtgtttgatgttgtcactattttttaacttagccattctaatatgcacagagttatatcgtattgaggttttaattcgaatttccctaagagccaatgatgctgaacatcttttcacaagcttatccgccatctatgtgttgtctttggtgaaatgtctccatgtcttttgcccatttttctaatggatttttttgtgtctattttgtttttacttttgggttacatgaattcttcatttagtctagatactagtgcatggtcagatatatggtttgcaggtatttttctcgatgtgcagcctgtctcttcatcctcttggcagcatctttctcagagcaaaattttaaaattttgtatgtcaaatttatcaaattgtgtcttttaaggcacacgattttaacgtcaaatctaagaactcctcctagcctttcatcctgaagactctcctgtatgtttttgtaaaatatttattattttgtgtttcacatttaaattcatcatctatttgcattttattttgcataaggtgtaaagttatgtcaaggttctttttcttcttttttctttccattatttttgtccacttgttctaagacccatgtgttgaaaagactatctttgctccactgaattattttgcactgtgtcaaaatcagttgagcaatttgtgtgggtctatttctgaagtctctattctgttccattaatctgcgtgtctatcccaacaccaacaccacactatcttgattactgtagctatttaataagtcttcagtctggtagacttattcctcttacttcattcttccttttcaacattgttttagctattctaaatccattgccttttcacataaattttagagtgccttttcacataaatttttcctacacctaaattccaaaaatattgctgagattttgataaaaattgtgtaaactgtgtaacagtttgggtaaaattgacattactgtgttgaatctctcaatccacgagcacaatatatttcttcattaatttagatgttctatgatttacttctaaaacttttttttgctttcaccatgtaagtacatggcttgttagatttatatttaatttttgtgacatagtaaaatatactatattttaaatttccatgtccatatgttcattattaattcacagaatgcaagtgattgttaatagactttatttttggagaacctttaggttcacagcaaaattgaaagacagagatttcccatctacccattgtgcccgcacgagcatggcctctgtcattattaataactctcaccagagtggtacattcgttacaataaatgaacctacgtcaacacatcattataactcagatccataggttccattagagtttactcttgttgttgtgttttctgtgtgtttggacaaatttatagtgatgtgtatctactatgataatatcatacagagtagtttcactgacctaaaatatttgtgctctgcctagtcatgcctccctgccaactaacccctggcaaccactgatatttttactatcttcataattttacctttcctggatgtcatatagttggaatcctacagtatatagaagcattttcagattggcttccttcagttagaaacaggcatttaagtttccttagtgtattttcatgtcttgatagctcatttctttttagcatctatagtctgaatgtaccagtttatttatccattcacctactgaagaacatcttgttgtttccaagttcaggcaattatgaataaagctgctataaacatccatctgcaggtttttgtgcggacataagttttcagcttatttgggtaaataccaaagagtctaattacttgatcatatagcaagagtatgtttagttttgtaaaaaatccttaaactgattttcagtggttgtacaagtttacattctcacaagcaatgaacaagagttcctattactccatatcctcaccagcattgggtggtgtcactgttctgagtgttgaccattctaagaggtatgtagtagcatcacattgttgttttaatttgcaatttcctgatgacatatgatgtgaagcgtcttttcatacgcctgttttccatctgtatatcttctttggtgagttatctgttaaggtgttttgcccatttttaaaatagagttgtttgttttcttattgttgatttttaacagttctttgtatattttggataacagtccattacctgatatgtcttttgcaaatattctctcctattctgtggcttgtctttacattcttttgacaatgtcttttgcagcatagaatttttcaatattaatgaagtcctgcttatcaattatttcttgcataggtcatgtctttggtgttatatctaaaaagtcatcaccagacccatatagattttctcctatgttatcttctgtgggctttatagttttgcattttacatttaagtttctgatccattttgagttaatgtttgtgaaaggtgtttgcatgtggatgcccagttgttccagcaccatttattgaaaaggttgtctttgctccgttatcaaacatcagtcagttgactatatttatgtgggtttattcctgggctctctattctgttccattgatctcttcttttgccaataagacactgtcttgattaccgaagtcttgaagtagagcagtctcaatcttctgactttgtgcttgtccttcaatattgtttttgtttgtttgtttgtttgtttgagatggagtctccctctctctgtcacccaggctggagtgcaatggcatgatctcggctcactgcaatctccgcctcctgggttcaagcgattctttcatttcagcctctcaagtagctgggattacaggcgtgtgccaccactcccagctaatttttgttgtttttagtacagacggggcttcatgatgttggccaggctggtctcatactcctgacctcaagtgatctgcccaccttggcctcccaaagtgctgggattacaggtgtgagccaccacgcccagcccttcaatgttgttttggctattcaaggtttcttgcctttccatatcatttttagaatctctttgttaatatctgcaaagtaactactgagattttgattgggattacattgagtctatagatcaatttgagaataactgacataataaaaatattgagccttcccatccatgaatatggattatcttctatgatttctttcatcagagggttgcagttttcctcatatagatatggtatgtattttgctagttttagatctaagaatttcatttgtgggaggtgctaatgtaaatggttacaatcaatttttgtatatttatcttgcatcctgctaccttgatgaattcacttatcaataatttctaggagattatttatagatagcttgaaaattttattttcatgccatctacatataagggacaattttatgtcttcctttcccatctgtatggattgatttaattgtcttgcctcattgcactggctagaacttgtagcagtacgtgaataagagtggtgagcgtgtgcattcacgccttgttcacaatattaaggggaaagcatttaatacttcactattaagtatgaagttagctgtaggtttatgtagatgttgtttattaagttgaggaaattctcctttagtcctatttttcagacaggttgtttcaagattagatatatcagtttgtcaaatgcttttagtacatttactgataacatcgtgtgatttttcctctatgacctgttaatatggtagattgtagtgactaattttcaaatatcaagccagatttacatcctggaaataaaccccaagtgatccattagtacattgctgaattttatgtgctgaaattgtattaataaattttccattaatatttgtaaggaatatggatttatagttttcttcttttgtactgtttttctggtttgggtatcaggctattgctggactcaacacatatactcagaattgttttcttcccttccatgttctggaaaagaatgtgtagaattggtgttaattcttcacaagattggcatacttttccaatgcagttatagaagtttgcttttgtagaagtttttaaattatgagttatatttccttaacagttatactcattatctagtatatccaaattactattaaatagccaaagtctaggccattcaaattatccattttatattcattgatttacagtagtttgtgccttttgaagaatcaatctatttcatctaaattattaaatacttatgtgaagaattgttcatagtaaacccttactgtctttttttttctttgtattttccaggcctgtagtaatattccctacttcatttctgatacgggtaacttgtgtcctctcaattttttctttgtcacttttagcacattgtcaattttattgaccgttttgaaaaaatagctctttgttaatgaatcttctttactgtttttctgtttttattttgattagtttttactctttattattttcttcttgagatgagaactttgattattgatctgagacttttcatcttgtctagtgtatgcgtttgggagcagctttttaaaacgcaatgcttaatttaacctaaatgacaatattttatagtaggcagtgcatacggtgttatctttaaaacctggtcttgctattaggtacctctctgagacgaaagtcttcaagcttattgaagtttatcaattagcaggtcgattaaaatgtcaacttttcttttaatatacccaaggtataatctatttgagggcagggacctgaagttgttagctcatatctttaatgcagaaaatctggccctaataaatgtttcataaataaatacacatttattccacggcccagttccattgttttaaatgagaatttgtcactatggtcatcccatagtaccaaggttcataatttcttttagcatacactctcaaagagatttggtttgctactctcaaacattcaaagtttattttaaattttatgatgatctggatcataaatttctttatttccctctcttgcctgtttccttttttccaactgatatcactaaactcctattacacccaatgtgcttttgagagctaaagttatcaacataatataaatagcaattaattcttaatatcaagaagtttacagctgagtagtaaagatgcattcatattgttagacccatctatgagtgggagtgaggagaagctaaaaaaaataatcttcataaagtaaatttaaacaaagcccagaagaatgagggagcatataatacacaaaggatataatacaaagaaattgcaagtggagacaattttattcacacaacaaaatgacaagcaatagtgataaagcaactaaaaaggaagacacaactgttttgatggagcttgccttccatcaggtaagaaacaccttaaacatacacccaatttatttatcacacatgcaaaaagggagtaaagctgcatgctcagaaaacatgtatgatgaattttttaaataatctgagatataatagtaggaaagcacataacataactcaaggaagttcagagatgtagggttgaaaatgaaggcaaaggctacattgcgtaggatctattcatccttgatcatattttctacaaggtatcacactagtactgagtatccatccaagactgaaatggtaggggtgagcctgcttgctaaaaattcttcagttgtattagtggcagtggctccactcctcgctaccacacccattttgcaattctctgccctgttttttgccctggaaagcttgtctcttcatttgtatcaccaacgcctcttgtgcactaacttttaggaaattatgtgacaccagctggacatcagagggcaagggaaaaaaaggtttggatatttgtgttccacttcacatatgcctcactaaggtcctggtagtgactgcccttttctattgctattccaacattattcctttaccttgacatattaggcctggaggtagaaacaaattacctctcttgctgcttgctaggtgactcaccatcccttatttgttctcatcagcctgcctatatgtttgtccatagttctttcaccgaattattatctgttaaatgcttttgaatctgctacctatatttcctaccaggatcttcactaataccccataagagatacaactattaaaacatgttactgattctcagctcactagcatcaatgcatttactatctttgtactcataatacctttcttacattcagaaatctttaaaaatcttcattaatccctgtacatttacctcataaaacagttgggaatcaatccacaaagtgaggagtcattattttcacaacacaggcaaattagttttgagttttgcttatatttggtaagcaaatgttttctttcttgactctatagatagtactgatatgtagtaccaagtcctgaaatcacatcgttatgtgaatgccatgggcttcattgtctatggaaatgtgagttaaagctctttttttttttttgtccagtggaaaaaaaaatctgaacatttaaaaatgaactcacaaggttccagatatctacttactaattttaaagggaattaagatggtgtcaagtaaaatttatttacagaacacacacacacacacacacacacacacacacacacacacacacacacaataatctctaaagtatcaaccatagatggagtggggaaccaggaccttcactcccacctggcaataaggcagcacacttctacctctatcttccaccagaacagtcagaaggggacgagctaaaatagatttaaataagatccagagtctgataatgtaatatcccaaatgccaaaaaagaaaatctcaactggaatgcaaaaagatagtagtcacttatactgacatgacaaagatgacagaattatctagcaaggatattaaagtagccatcccgaaaattgttgagtaagctttttaaaacattttgcaacaaataaaaaatgggaaaagtcagaaagaaatagaagacatagaacgacatgacattttagaactaaaaatatcgtaatcaaaaaaaagttcaataaatggtctcaacagtagaatggaggtgaggagacaggggaaatctgtgtgcagaaagataggacaatagaaattacacagtcgtaacaagaaggaaaaaaacgatttttaaaatgaaaatattctcagttgtcctatgggattataataaaagatctacggtttatgccatcagagtttcaaaaagggagggtgttgttgaacaagtactcaagcacataatgattgaaaaataccaaattttgtaaaatgcaaaaccctacagattcaaggagctgagtatacaggataaacccaaagaaactcatgcttagacgcatcatagtcaaatgtctgaaaactagttatattttttttttaaaaaaagtcttaaaaacagtgaaagagaaaaagacactttatctataggcaaaaaagttcaaatggcagaggatttcttatgtgaaaccatgaaagcccgaaggaagaagtatgacatttttcaagtgatgaaaggagagaactgtcaacttccagaaaatagaagaggaggcaacacttccaaatgtactttatgaggaagaagtattttgataataaaaccaggtaagcacagtagaagagtcaacaaattacagaccaataaaactcatggatatagagacaaaaagccttaacaaatttttacacattatattaagaagctaaagaagaataatcacttgatcatatcaattgatggaggggaaaaaacgtttgacaaaattcagtgccccatttatgataaaagctctcagaaaactaacaatggaggagaacgtcctcaacttggaaaagaataactacagaaatcttatagctaacattgtaataataatgaaagaatttacacctttcttcctaatattaggattaaggcaaagacggttgctttcagccctactattattcatagtactggaagttctagctagtgtaaaaatgcaagaaaagtggataaaagcgtacaaatcaggaaggaaaagttatactgtctccatttgcagatgttatgatgatctatgtaaaatcccaggtattctacaaagttactcttagaaatgatgagtttgttaaggtcttaggatacaagatcaacttataaaagtcaattgctaatcaatgaatatgaagtttcatttatataagatgaataagttctagagatctgctgtacaacatcgtatctatatgtaacaatacagcattataatttaagaatctgttcgttgggtagatctcatattaaatcttatcacagtaaaatgattattaaaaattaattgtatttttgtatacaagcaattaactactgaaacccaaaatttttcacatagtatcttgcagtcactctgaaacaatgaaatacttatgaatctaataaaacatttaccagatctatatactacaaactaaaaagctaaggaaataatgcaaagacttaaataaacggagatatatactgtattaatggaattggaggatacaacatagtaaatatatcaattcttccaaaactaatctatagtttgaatgcaattcctatcaaaacatcagtgaaacatttttgtctatttggacaccctccaaattgcttgaattctatttgtcttattttttctggtcctagtgcctataaactcactcacaaactagcatattttcccattggacttaactaaagagattttttaaacacctaagaaatatatgccttataatatgggtaacatttcaaccaatatggatcactgtggaaaaaggaagtagaaatgatccataatgattttttccctaatcaataaatttgtgaattttatataagtatattacctaataagcctgtttctcttcaacttatttgtcctgtgaagctgcattaatcataatgcttggaattatattaaataatcaaacaagttgggaaaatgaccctgcacttccaaagtaatataaaataatgcctttagggtttccaattatttaagaattaactccttgttcactttacgtttaccatattcagttctttctaattaatatgccatctatttaataacacaaggatgactggttaatattggaatataatcatgggccagtcttcattttacaacatgtatcatctaagtgtagacaaaaaaaagtaatttaaaaaaatgtgtatgagttcactgtaataaaaattatgctttatatttttgaaaaatgtatgtctaattaattcatctgtaaacaattgtaatttcattaaaattttaacaaaataatttcaactttcattttgaatcgggggtacatgttcaggagtttgttacaagggcatattgtgtgatgtggaggtttggggtactgatgatccagtcacccaggtagtgagcattgtacccagtaggtagtttttcagctcacacccgcttccctccattccccctctagtagtccccagtatctcttgttcccatctttatgtccactgtgtactcagtgttttgctcccatttataagtgagaacatgcggtatttggttttctgttcctgtgttaatttgcataggataatggcctccagctgcattcatcttgctgcaaagtacatgatttcattctttttcatgaccatgcagctaaccaaggaggtgaaagaactatacaaggagaactacaaaacactgctgaaagaaatcagagacaacacaaataaatgcaaaacatttcatgctcttggattggaagaataaatattgttaaaatggccatactgcccaaagcaatttacagattcagtgctaatcttatcaaactaccaacgtcaattttcatttttcattttcattagaaaagactaatccaaatttgtatggaaccaaaagagcccatagagccaaagcaatcttaagctaaaagaataaagcaagaggcatcacactacctgacttcaagctatactataagcctacagtaacccaaacagcatggtactggtacaaaaacagaccatagaccaatggaacagaatagtgaacccagaaacaaagcgacacacctataaccatctgatctttgactaagtcaacaaaaataagcaatggggaaaggacttcctattcaatagatggtgctgggaaaactggctggccacatgcagaagattgaaattggacctctacttttcattatatacaaaaatcaactgacggtgaactaaaggtttaaatataagacctcatactgtaaaaaatcctagaagaaaacctaggaagtacccttttttacattggtcttggcaaagaatttatgactaagtccccaaaagccattgcaacaaaaacaaaaattgacaagtggaacttgactaagccaaagagcttctgcaaagcaaaagaaacatcaacaaagtaaacagacgaagaatgggagaaaatattcacaaaatatgcatctgacaaaggcctagtatccagaatctataagaaacttaaatcaacaaaccaaatacaaatacattcattaaaaatgggcaaagtatatgaacagacacttttttttttttttttgagatagggtcttgctcttagtccaggctgaagtgcagtggcacagtctcggctcactgcaaacttcacctcccctgctcaagcgattctccagcctcagcctcctgagtggctgtgatgacaggcgcctgacatcacggctgtattttttttagagatggggtttcaccatgtcgccctggctggtcttgaactcctgagctcaaagcgatctgcctgcctcaacttctcaaagtaatagaattacaggcatgagctaacacacccggcctgaacagacacttcttgaaagaagacatacaagcggccaacaagcatataacattttttaacaacgtaaacatttttaaatgtgcttctttttacaaactggccgagtgtggtggctcatgcctataatcccagctcctggggaggctgaggcaggaggattacttgaggccagaagttaaagaccagcctgcgcaacataacaagaccctgtctctaaaaaaaatattaaattagctgaatatggtggcattcacctgtagacccagctactcagaagattgaggcaggaggatcacttgagcccaggagtttgagactataacgaggtatgattgtgtcgctacactccagcctggatgacagagcaagcctccatctcttaaatgaaaatttcttaaaaagcaaaaacaaacaggaaaagaacgggttttggaaactctgctgttttcctttttttgtgcaatcacatgcataaccgacagtagtgccattatattagaaatattaatatatctaatcacaacacaaagcactgtgtaaaaaagccgagtatgatgaaataaattaaagataacctaaatattggacatatgtactatgttaatgaattggaggaatcaatgcggtaaaaacatcaattcttccaaaatgtattcataattttaatgcaattcctatcaaaattctacctgaaagatattctgtagatagatctgtagatctatttgtagataaacttattctaaaatttatatggtaaattataaccacactctgggacatgaatctagaggaatgaaaaatgaaaaactacatgattgttttgcagctttatttgtagtgaccaaaccctggaaacaacgaaaatatcccacagtatgtgaataaagtaactatagaacatccatgccatgaactactactcagcaataaaaggaaataagctattgatgacaacttaaatggatctcaagtacagaatgccaaaaaaaaaaaaaaagccaatctcaaaaggttacataccgaatcattgcatttatctaatattcttaaaatgacaaaattacagtgatggagaacaaattgattggtaccaggctttagggatatttagggagggtgactgttgtgactgtaaaggggtagcatgaggcaaatctctgtggtgatgaaacaggtgtttatttgtggaggttgaggttacacaaatcagtgatgaaatagaaatatgtatacatatcaatgtcagtttcctggttttgatactgaattgtagttattgtaggatactgaattgtagttattgtagttaatctttgggagaaactgggtgaagggtacatgggatctctgtatactatccccgcaaattcctgtgaatctataagtatttgaaaataacaagttaaaataaatttttaaaaattctgtgacagttattaaaaatggaaatttgagcaagttcctttattatggggctaataagacctacaagatgtagttattctgaggactaaaggagaaagataagtgattaagggacacaagaaagtactgtggtgacacagtctgaactggagttcaatttgttcggtctaaattttattttacgtgcctttcacttttccagttattgtaagcatatatttgcacctggattataaaatcttaagggaagtatatgcattccacacaatgcagaaatcattataggtgccaaataaattctgattatcaactaaggctgaatggcaattaaatgtatctcagggcattcagatctatcaggatttggtgctttagacattacccaggacacatctttgttacatttagaaccacggttgtttttagaaacatacactttagggtttctcaaagttgaccatgcattagaatcaccggtaaaacacagagtgctgtgtcccaaccccagaatttctgacttttgaggtctcgtgtcaacttgcatttctcagaagttcccacgtgatattgatgttggtttgggaccgacaagttgtattcacgccttggcctaaacaagggtttatgtttgtagaaaactcacagtgcaagatacaaagggcacttatactctgggcaatattgtacctcacagcatagagggacactgatgctaacatgcagacttagagccaaatcagccccaaaacaattttttcattttttctatgttgttttatgaaaattttgcttatatgcatatttagacaaccacactgagaggaaaggaggtgacctagggaaaagaatgttttaaattaaaattaggccttatgttttatctcatacaccttttgctggggaaaatagcaatgttatgacaataatattctaaaacacaaaatgtacaattaactattaaggtaaacatcacagtctgactcaatatttttttaatttttatctattactcattgcagtcgcaagcagttgaatgtttgacatagaaaaatgagtctgtcactttaacaaatggtacaataaaaacactcaaacaaaaattttagtagggattattataactataaaaagaatatctttctttaaaaaatgtttccaatgttttctatcaattttgggctcgcctgttgcataaaagtaataaggaacaagatgaagaagctttctattggcaaagaatgatttacatgctgaatgacataatacaactgtattcacttaatacagaaaacaagcctctattcagaaccattaaatgatcattaactcaatgtctaaaaaaatggtgttttaagaattggcaccagagaaatggaagaaagaataatttgttagtaaagaagttttagcataattcacaactgaaatttaggatttgagaaaaatttctttcctgcattataagagtattctttattttagcaggaaaacatgtcccatgagacctatacacacacacattctgccttcagaattcagctgctgcattctgctgctgcttctcttattcagactgttggcatcatcaatacataacttttgattgaatcccaaggggaaaaaataactttggtagacagtggatacataacaaatgcatggattattctgggcattcctttttatttggtagagtgaaatttttggtgttgttgagaggataaaaaaggcatttaaaagtcaattttgaatccggattttctgctctgttaataaattcacatgaaagttacagaaagtattgttatgcttttgtactgaatagtttttgtgtttagaaggctttaaaagcaagtactatgtccactgtgctattctggtttggatattaatcagaacacagttgagcattgtttgaattcacagagcttgccatgctggaagcacaaccttatatgtagtgaccatggacagtcctattatgggaaaccaacttgagagagaaggcgggtcacttgcttgtgcgcaggtcctggaatttgaaatatccgggggcctctacagaatcctggcatcagttactgtgttgactcactcagtgttgggatcactcactttccccctacaggactcagatctgggaggcaattaccttcggagaaaaacgaataggaaaaactgaagtgttactttttttaaagctgctgaagtttgttggtttctcattgtttttaagcctactggagcaataaagtttgaagaacttttaccaggttttttttatcgctgccttgatatacacttttcaaaatgctttggtgggaagaagtagaggactgttgtaagtacaaagtaactaaaaatatattttactgtggcataacgtttagtttgtgacaagctcactaattaggtagattgattttaaattatcacagtagtttgcaaagaagcataaatgttatatatactgcatatatatatgtatttattcaggaatatatatttttcattgggaaaacttttcaacagaaatggagtgtaaaagtttttctttgcgatagaactaaacacatgatttcttgattaacaaaccactgcagtaatagaatatgcagaatgtcatttgactataacagatttattttgattgctgtgagatagtttgtatatctgagttattattttgattagttgatacttccgtatttagtaacagttacataaaggttactgacctgacatatattctcaattgaactaactactgtataggaactacatggaggcctaaaagttagaaaaagtttctctgacacatcatggataaaataaagaataaaatgagttgggacggataattgaaggatgtgaaaagtattgataaagatttaattttaatgtttcttactcacatttactatttcaaatgctcttttctgtagcatatcatgataattatttcaaataatgatgtgatctatgctatcaaatgatcagatgatttcttgggtaaacgacatacaaacttgaggaactcctaattatatttagtagtaaagtcaccttgttgtttcatgtctattatgagccagcttttcagttcaattttttagtttgtctttcatatagaaatacaactatttcgtttatttttaagaaagtcatgatgactaatgaaggatttaaaaatggactgtggcacaacagtaaaaataatatatgataaggactgtgtgtcccgaagagatgggagtttatctcttccccacccatctttgacttgtggagtgtagttattctaaaatagatatgagggcaatgcctataattaagaatgaaaaaataaatctctccaaataagtaatgctccacaactactaaaaaaaaaggcagaagttttgccactgggaaaactttgtggaaataagttaacattgtccatgtattgagtcacattaaaagctaccagactttataatacaatatttacttacattgttggcttgcttcataaatttcttttggtggacatcattattacttttagattgaaaaactattatatttactatcattacaaatatatgcatggcatatatctgttgtttgcaatatacacacacatttttattttttgtttttatttctttgatatatgtaacataaataccatcaaaatcactagtgattttatatatatatatattctacataattaacatcatatacaagtatatagagcaattttgaaagaatatatgcaattctgctgaaattaagcaaggtaaatctacactctgctttgtcatagatattcaaataactttcaattcttagaatgcgaagaaaggtaatctttttgggacatgccctgtaggattttttcacgctgcatttaaaaaatcatcaagtaatgcctatgcaacatgacaatgagtttggtaagaaaaaacggagatatactcagggctatattatacattaaattttgctgtttgacaacatactgctacttggatgtttgacatttgaatccagtttgtaaatttgccgtagtttgataaacttacaaaagtacgttttgttgttttttaaccaaaacagttaccctttaaaagagatcactgtattgtcaaacatattgtattgttcacttttagaattactcaaataatgcattgtaaagaattattcaaatagtgtactgcaaatagacatttcatttgaatatatttaaatgatgtaagtcatctgaggtctaataaaatcaccttttagaatttcatctgcagaatcttttaaagacatcttaactacgaaaaagagattgctgatctaaattgatgatatactgttaatacaaagcttttggtgtatcttacatgacataacattatgaaaaatacaatagagtatgtcatatagatgttactctaaactttaaaaaaagactacaaagtgttctatgcataattacattatttaaggggaaaaaggtgttggctgacactattccagctagacagtactgaattgcaaattcatcatttgggcacagatattaatacagcttcctctttattcctatagcattcatttgaaatccctgtactccatgtcatttgctacatatgaaacaaattgtcaagtttttaaccacttgtgtagtttaataaaagagattaaaatcattgtcttggaaacatcaggtgtttttcaaaattctattttattatctttcatcaaaattttatctcaagagtaaaacaaagtcatttcccaaactttccttctccttccaccttctattgtaatattttcctaacttattaaaaatgatttatcatactttttcatcaactctttatttcatcacacatacaagaaacacagtattttggtatgagtatatatatttatatatatgcacatttatatgcattcaaatcacagggtataaagtttcctaagagggtctaattagaaattaacctttctttaaagataattttctgttcatttttctaaattttctattttaaacacacatcattttttaaggaattgacaaatgagactaatgtacattccctgtctgacaacacagaacgaaccaggaagaaaggatttatggggcctgaggttatacaattgggggtgctattttaagaaaaataatagaaaattggatacagccttgggaggggcccctcatgtaagtaaggctttaatagtttcttgggaaatcacctctgtatgaagagatgtgttgacatttaatcttttcccagttacattttaaaataaaattgatgctagttatatttctttagagcatttattatttctcaaagacaaccttttatttaatgcagattagagagttaaaagaatttataatggtaggaatttgacatttctgcctttcattctgaaaagatacattgattaaagtgatgtcaaactcagttaatggaggcggtgcagttatttgaaatatacagggtatataatttgaaggcacgccaaatcacaatgacaaggaataatgatgaccttggtttatttttatacagtacattcaggttttgattggattcagagagaggcaatggttttctttctcacaaagtcctgctatagtcctaggaggtttgtgttctgttatcaaggcagttggttcgtattggaatattttctggggaaggtcatgggctgcagtgtgggaaataaacgtttttattaaatgcaaccaggtttcatgaaaatatttccccttgtagagtgtgctcaatgcagtatactgatcttcaaaaaacaaacaaaccaagcaaataaatagtttgtagtcttcaccttttccctacgtaaaacatctattagttagacttccttggggtttcatgctataaaatattgacatatgtttggagttctgaagtttcattttaatacagatatcaaagttaaaatggcaacaccatgggataatttattattttaccaagtttggagggttttttctatttatgtcacttatagaattgtccctaaaatccttgcaaaatttcaagctccctctacttaatactaaaagtgaatgtgtcttccagagattctgataaccccttcgaatgggagagtaactctgctatttgtgaatcactcctatactaaatatagttccaagattaaaagctaaaatgattttgtttattttttcatgaaattttttcatgaaaggcttgatagtataaaaagtctgtttccctcatatattacagcatattatagcattcaatgtgccttcttaaaccagatggctcctctagagattatgaaatactttaacacccagggcatagcctttctgtttccccattcaagattacttccttgaatatggcccaacaaaaagaccaaaaaaatacatttggctccagcgttttaagggcatataaattttcttaagcacaattctgataggcagcagacaaatgagaatgaggaagggaaatggctctgctgtcttatgcttaaaagtgtcctcatatagagagaaacaacacaccctggggcctttcggagggtagagggttggaggaggaagaggatcaggaaaagcaactaatgggtactaggcttgatacctgggtgatgaaataatctgtacagcaaacccctatggcacaagtttacctatgtaacaaacctgcacttgtagccctgaacttaaaagttaaaaaaaaataaaataaaaagagtcctcatctcacggccatacaacctctacctcattcccattaaaaacacaaagatcagtactccctcttttatagctcacatcttctgtttaggctgccattttaagggataatttctattcaactctgagctcgatctttattttaatctgatatcactcgttcaaaatacttgggaatttcagtaggcaacggaacacacagagcaattttctggaggcctacaacctctgaaggtgactttgcgtagtatatgtaatgatagtaagccctgagaaaaccaatgttcttagtagtctggatttggtttagaaatcaatgtattcctgctttcttttgtgatcttttgccttctccctcaatgcctcactttcactctgtcattatgaaccccattcctcactaatgggaactgggggagaatggacaatgatcctttaattgaaatggagttgtcatttccttgccatgctgataaaatgttgttgctgttgttgtttgttgttgttcttaaatgactctttcagaatttttaactcagtattttgattacataccattttaagaaaataattgtccataaattaaaaatgctagcaaattgatgaattgattttctcatgccaatttggaaatctgaaatatatctaagactggtgaataatatgtaggtctaattgccatttgaataaaagaatctgaggaagagctttgcctttatttttgtttattattcattttagtttagttatttattttagtagaaaaatgtggttgtgtcaacgaagaggaggtacattaaaatgcattattaaagccaatgcttatccatgtaatgaaatgagaatgtagatggcttaatgggttttggagaggattaagataattttaaagaaacttcaaaaaatcagatgctcgaatcatgatgttttttgtttatatttaataaatatgaaaaccatacatgggcatatcaacaatgaggaattcacatatatatcacgaagtctcttgctaatttgtcaacttttaaatgtgttgtcttcactatcatgaaaattttgatttttaaaaaaggtcagtgttagctgagcacaattaccattacggtgtcccatattatttccaattatgggcaaataaaatgcttaccctttaaatgtttttaccctcttcttggcttttgttttgttttgttttaaagcgttctcccttcttccactctgcttttggctaagactgtcatggaatcaggactataaaagggcataaacatcagtagcttttttctcattcctggcactcatctttatttgcactcaacttgtctcttcctttatcagattacggttgcaatagtaccttagcctgagctaagtgctgacttaaagggcaagggagtcagtacactgttacaagtgcagattttagccttggaagctgtgtgaggaaaaattaaagaaataagaaagaaaaatcacaaaatcagaatggcccacgtattttcatcaaaggcaaattgagtaattcctttttatgttggtgcttaagaacgatgtattagaaataaattggtgactaagtgaacaaaatattaataaactagttgagtaagtgaaaaaataataatctgtaaaaatgatgaatcccaatgactcacatgttgcaaaataactaggaagcaaaagggaaattagactttaaagagcgtaatcagatgcaagaaatgttggcttgtaggtggttaactaaaatcgcttacgggaagctcagacagctggggaatcctgatttagtagacgctgaagggcagggcatgagccatgtgaacagctgctgaagagctagaggattcctttggattaggtgtacacaccccgtctctaatgggctgtcagagagcaccaagtgttatcacagaggttcactttgctcaagcctatggcttttgcagtgttttactttaaatgtctgaaaatggattggctctcaaaataaatccaaaaataaaagtatcaaaataagtgactctctaaaacttgtattgtgtggttttgggtgaccacagtttaaagaagggacttacagctgatgatttgttatccatttattgattcatttgtccatgtaacaaatacacatattgagtgcccattttgtgccaggtactgtgctatgctctggcgatagtattctaaacaagtgaactcaaagagagactagcatttcaaggaggatgtgcatattaaatacacacacacgcaaactacttgcattggagataagggctatagaataaagcacacattgtaataagaatgtataatagggagagttagaccagtcttcgaaattggggaaatacttctgagaaaaaaaaaatattcaaagcaaggcaaagaagaatgaggttagagtatagttgtccaaaagaaaagagggagcaaaaatgtccctgtcagagggagcaatgtttctgaatgtggaaaatggtatggagaaagatctaaaacaagtacagctttcctagagtacagtgagggcagaaaagtgtggaacaagcttgcatctgaatggccgactggggtccaatcattcagagccttgaaggttatagaaattatttttctctttatactaagatcaatggacagccttatgggtttcaggtagaaaactgatgtaaacatatttgtattttttaagactatcactctgttttgtgtgaaagagattggcaagtgcctagggtagatgaaggactatcaatctgaagcaattacggtagctcatccaaaagaaggtgatttggactagaatggggacagtggagatgaaagaagtaaatctattcaagatttgtatatgagatagaatcaataggaattggtgttgtattgcatgctgtgtgctccatgaaatgcacacctgggtggataatggtgccatttgcaaggagattggaagggaaattggaacaacaggaaggattaggggtgtggatgctaaggtgtttgttttgttttgtatttttatgtagcgcgtgggtattgtgcctagaaatgaagtcattattagggatttaaatatgcaactcatggagtggatgagaccagctagaaagataatagagtgtgaagaggagatcggaaattcaataaagaagacaaaagcactaaaaaaaaaaaatcagagaagacacatctagaaaaaatgatgaaattctaaggaaaataatatttccataaagaggtctgttcctttcgatctccaatttaatgacttcatgaatgaggatcccacttttagcattaggtgtcttggtttccacagtctctaccatctatttacccctaatttcctcccatattgctatttctgtgaatattaccaaaatgttgccttagtagaaaagcttcaataaatatttaaattgtataacgtattcagctttttcctgtactctgcacttcctaaaaataccttcttcggaaaccccatttcaactgactactgtataatgaaatgagccttcagtgtaaaacatttatcatagtctcaatttcaattgctcagtcagaattgttgagtaatatgaaaaatcatcctttagagaatacagaattgcatagttatgacaaggtaagtttgcactttatttaatgctagtttagttaatatagatgcttattggagaaatgtctaaaaattctggaggaccgttagtgaaagtgattatcccaatatctgcaaaaatggtaaaaatacctagaaaacattgacatttcagtttaaataaagccagaatcacaataaagagatagaaggcatttgagtaattcaatctaatcatggatgaatgtaatgtacttatcagttagctttggaggaagtaagactcgatagaatagtaatatgatattgagcaactttttttaacattaggtttttaattgcttataactcaacattgttgaacacctatgttctctttgctttttatgagacagcaactctaagtcagagaacagatacacacacatatgtatatgcgtacaactactataaaatatcaagaaagttataaagcatggtacaaatcaatcataaatgattacttatgaatagtgtgattatggacattctcattgaagaatccatttttataaataggcataagagtatggacatacagagatgtgaattagagaatgattgcaagaagcagtgaggcaaaaaggattaatgaaacattgatctgtcttacatacacagctattgacagtaccttgtgtgtgcatagcactattctagattcacctaatcttcaatgataatactgtatttaccatttaacaagcctgtaataagtgtcaggcacttctctgattacatcacatacatatgtgataagttccatattaactctagaaggtggggaaacataatcatctaaatttaccagatgaatatgtagaggtacagggagattaagtaatttgcttaaggtagctcagctggtacgtggtagagtcaggattttaatggtggcagcatgacagtaggattaaagattcttaaccagtcagttgtcacgatctctcagattttaatagaattctaaaaaggatagaacaaaatataaaatggcaggaatcatagtatcttctaacaagaactagacatgtcccattgaggatgctctttaaaaataaaacccattaaaattttgggttgtttactcaaagcctatagacattggcatattatattttcttagataaaaactgagatatcctaaataactcatgcccattctctagacttgcatagggagctgtctatgataatatccataacagttatcttgtttcacaattttattactatctcactcttcttactttgtgaagatgaaaaagatcaaaaataaaactaatgcagccctggtttgtttgtaatcatctacagttagccatccttagagtggtctcactagttgttcttttagagtttatttcagttatgtacaggcaactgtgctacatgaacaaaaagctaagaactgggctaacctgaacatgatttagtattgtaaaaaaatggtttacatagattaacgtgccatactattctgaatagtacttggcataaacagtaggttatttaagttactataattactgttgcctttttacataaactaatttttctcttatcttcattatgttagtcatccacagtgtgatatttagttgcatacattcatatagtgtacactgtacaattctagagtgtaccagtaacgtggactattaatattatgctatgaggtaaatgacacccctggagttaagcaatgtgcactctgtacgataacgtcaacattggcattctcatatatatgattagaaataatactgagtttctctgacttcacaagcaattttattctctcatctcataaagaggtaatgaatgcacacatatctacatatttaaaaataatgtcagagatcgtgatggaacagaattattcaagatgtataaatgagggtgggaggcaaagggaagtcagaaatactccccaataatttatttcaaattaaaagcctattggttattggctggtcgcggtggctcatgcctgtaatcccaacactttgggaggccaaggcgggcagatcacctgaggtcaggaattccagaccagcctggccaacatggtgaaaccacatctctactaaaatacaaaaattagccagacgtggtggcgtgcacctgtaatcccagctactcaggaggctgtggcaggagaatcacttgagcccgggaggtggaagttgcagtgagcggagatctcgccactgtactccagcctgggtgaaagagtgagactctgtctcaaaaaaaaaaaaaaaaaaaaaaaagtctattgattatcatgtgcgtttccatggtatcaattgtttagtattgtccagtaactaactagtatataaaactatcaggataatataaattttaacatttatttaaaatgcatcttcttaactgtaaggttattgatctttggataagctatagaaataagccttaattcagaaatatatttcggagacccagtaggttaatttgtagcactactctttaatattaaatatacaaatatacattgtttttataacttactgctataatgacactaagatgtgtgattatataaaaataagaaattgttagaatttattttattttaatcaatgctgatccatttttctagtgtatgagattagatgaggttgtatgagataccacttttctaggaaaaaagaaagtctttatgacagtgtgatgaatgaagtaaattagctcatttctttcaatattactagtgtgcatagatcttctctttttgtctttctgtctatcatacatacacagaggcacacatacatacacattacttggaaattaagtggtttacgtatgaaagtttttggctttactgataagatcagtaacatgataaataatacaacactgaatacatttttccatttgaaaagtgtaaagaacactacaacacggttgggaaaaaaaaacaacttattatattcaaatgtcattcccaattgtaacaaacatataattatttatttcttaattaagaagctattaataatagtactttaatattcaacattagcagtaactttgttggtttcttttttgataatttgtttaagaaaattagattataaattctgttatggtaaaaatacaaaaataaagcaaagtattatcttctttctatctcttatatgcatcagttggacaagatattgagattctcttttcttttaattgcatgctttcattatttttctattcaagcttcaccctgctaagttcaagtgaagtagaggacttcatgtctctagaaccaattaatgaaatttcttcgtctttcttgaacttgcagaaggtcaatagtgaccattttctcccttcttaaaaatgttgtcgtctttaagatctgtgcactgtcctctcatggcttcactactactttggagggtgtttgtattcagtctgcattgcaggctgatcctctcttctcagcctttaaaaattaggtttccttgggatctagtcctagcataattctcttctcataatgatctcttcctcgatcattgcacttatgtccacagctttattaacacttatatacagataactaaccaagttatacctctagcttagatttctccaatgaattccagaactgtgatttcaactgcctgggtggcatctccattcttatgtgatagtcacctccctctaaatgccctaaacagaactttctcttcaccgcacaaaacctgcttccttctcattgtttttcttatcattgaatggtgcaaccattcacccagtttcacaagccagaaacatatctcatccttgaaactctgatcttttttacccagttatttctaagtcattgccagtcactgtgggttttatcctctaatatattttcatccacttctctttatctcctctaccatcatcctagcgcaatatattttctctcactaggaatacagcagcctttcctttccagtttctctgcattctctttcgtattcttgataatccactctctaaacttcatgcagccaattaaattcgaagataccaccacttgttaaatcatgttagtagtttctcttggttgctaggaaagccaaacaaaacaaaacaaaacacatttaaaaatcaaagtctagacactgcctacctctcctatctcatttcccatcatgtttcctttgcctcgcccccttactggctttctttttgttccctgactaggtatagctttttttttttatctacagtacttttgtgtatgcttttctatttgtctagaacctccccgtttccccttttttaccttgatgacaccattttccacctacaagcttacctctggatagacatcaaaatcccctaagtacatcaaattcctctaccacgtaacatctgttcataacacatagcactgttatgattccatatgtatgtacgtgactaattaatacttgccagtcggattatgtggtaagttctatgaaccaagacacctcaactgttcttgctcaccactttattacctggaaccaaacacattaggtttccccatatatatttttaaataagttacttgatgtgtaatgctttaatgaacataattacagatgtttacatataatatgttataataatgatattttgattgcattttatgaaaattttatatgacaaagcactttcattttggttaaagcttcatatataaatatataataaagatttgctttttgtcattgggtgctgttcccttttttgatttcccatactgcttttcacttgtggttcttgattttgttttttactgtttttaacccatgtcctttttctttccttaatctatctttgtaaagtctcaaagaactagtatctagaatatataaatatcactcaaaactgagcactaaaaccacaaataatctagtggaaaaaaatgtgggaaaagccttaatagacatttcactgaagaggatatacagatggtaaagaaatgcataaaaagatgttcagcttcactagccattaaagaaatgcaaattaacactacaatgagttatcactatacacctatcagaatggctaaaattaaaaaaagaaaaacagtgacaacactgaaagctaacagggatgcaaaggaactgggtctttctaatattgctgatgggaatgtaaaatggtacaaccattctagaaaacagtttaggagtttcttctaaaattaaacatgcagtcaccatacagcccagcaattgtactcttgatatttatcccagaaaattgatgtttatgttcacccaaaaaccttgacatgaatgcagtagctagaaacaagaaacagctcaagtatccatcaatgagtgactgttaaacaaactgttatatactcataccactaaatactacacaacaatttaaaggaatgaactactgatactcaatattcacaactccaatggatgtcaagagcaccatattgagcaaaaaaaagtcaaaggttaaatactgtgttatttcttgtatataacattactgaaatataattatagatattaagaacagatattgatattaagaacagatattggttgccagaggtcaggaataaggcagagggtatgctatataatggtgccacaatggagccttgtggtgatggacctgctcaatattttgattgtggtgtttgttacacaaagctacacttgataatgtcgaatagagcttcacacacaaacacacacacacacacaccagagtcacacaagtgcatacttgtctatctggtaaagcccgaataagctctatgaattatagcaataatttcccagtttttatattgtactatagttatacatggtatcaacattgggagaggtaaagtgaagtttgcacaagacattgttgcatatttctttgcgacttcctgtgagtctataatgattgcaaaataaaaatttgaaaaatacagcattagacctttaataagctcttggttttctgaaggctagggtatcatcaccaaacctaatcgaggataagtcttgtaaattaataagtctatcactcaaggtacaaaggatggtttaatgctaatctgctagaatgcaatccatttctattatatgggaacgtgcatcactgattgaataaaatatcatgatgatggaggccgtattctatatgtcctactttgtaaggtgttgtgtttcaggttgtttatgaccaaaaaccctatatgacaagcgctagaagttatgctggtccacgggcatggtaacttgacaatgcctgagactacctgggttttaaacttgcctctacctacaaaggcaagtaatcctggacaagccaatatttatttaactagtattaattgagagcctaccatatttctggcactgagctgagcatgtctactactgtcctcaagaggaaattaggaaaaataatgccccttcacaagcttacttattgttggctttaaaagggggatatataaagtttcttggtgagggtcaaagtgttgagaataatttttctttgtattattttaactattattgttaatcacaaataactaatgtatataactctaaaagataaatgtacatttggataccaacttgtataaacagatacatagatcaaaagactacctctgattttatgtttgtgcgtgtgtgaatgatctccttgctttcaatctggtcttcagaaaatcccaccttgtaattgctgcccccgttgagtttctaaaacaaataagattgtgtgcctccagcttaacgtcctttagagaatcttctagcttcagggtaaaatccaaggtcctaacgtacaaggtctttcacagtatggcatctgctcatgtctctcacctcctgatctgctgttccccaccaggaacacttctgtctagatataaaattactttggttcagcaaataaaataactttggttcatgtaattttgtgtctatgacttgttcccacttcttggaatgttctcccaaaaaccactatcaccatgtctcttccaccaatgactattaatattatttttatctttccttatagaatattgtttaaaagaattccttactaccctaggtcagaaaatggggccccaatatgtattcttattgtaaactcactatggataattctagacaagcaattatatcccctattttagctgtcagtttgcttctcggcttctgactcactctcttgctccttgaggagatagcctgtgcttattatatgtggattaattgtgcctaacagcttgtaggtacacaaatgaatgactacacagcatttatctgactattgtttagccattacatcactgtatacatatttgaaactcaggcatcattcagattggaaaagccttatgaatactggcatgcattattttgtacacacacacacacacacacacacacacacacacaaaatagaacaggatgggataatcctaagtagatacttttttgtccagtgtactcaatatattgtaaaaattataaatcttagactaaaatgttggttgcttaatttggatgattcatataatctgtcgtgtttttggttatctgtgtactttgttttctctttctttcttagtctcaaaggaaatgtccaagttaaaaaagagccccaatttgtggggattcctttgaggagttacaaagctgagatatcttaggagatgccaaattgatgcaaagtggtggagaggtgagcagagtagaaatttggagaatcacttctgctcctatagtgcatgcatgccagggctgctgtcctttgaggtgggcacaggagctctaagtccagtgggtgtctgaggacagattactgagaaagtgaatggttggcttggactacctcaaagacaagtgtttgctcctgcttgagctattgttggaggtttcctgaaggagacttagaacggaatgtccattccagagagtattcagtttcagtttgctgcattcctaagcttattttccaccctgggagctggccacaatgattggaaatctttcatctgttttaatctgggattgagctcatttataaaaggaaacttagtgtctggataaatatgtgtgcacaagcatggagccccatacaagtatgcccaaattcaaggtgagaaatgtttattgcatgactcaaatacatggaattgaatggactctgaaaacaaaaataggatctacagagccagtctaacaacctattcatatttattatttttgcacttaaatgtttgtaatattttattgaccagtgaatatgaactatattttgtatattacgttaacatattattcatgtaataatgaatttttaaaaactggtgtcttgaaccctttcaatttccaaagtattacagaaatccacagatctggtatgcacaggcattttatgagaaaacttagcttgagtgatatcattaatttactgaagtagtaggccctctgacctgcttttataataaaattaagtttctgtaaactaataagaccatagtaactttttctttaatattttatctttgaggagatttgttaaagaggcttgtatgtgacatgacaatctattttgacttataaaatttcaaccaaagaaaagatgcgatatagtatctttgttcttatctatgacaatttttatgatgatagttccataattaaattttttcttaatgaaagtgtatattattgtattatcttcaactaaattagatcatataacccaattttgatctccgtatgccaaaagcagagaattgaccagccagaaaaccatccaggccttatataatatattgtgcctagatgaaagcttataagcattcttctgcctggggctcacattgtagaaatgtggtgtgcaattttgaaagttgaaaatatagactctgattgagaaatggaaaagagtagagttctaattcatgacatctagaaatcaagttctaccactgaaaaattaatttgcatatattcattatcttttatagtgaatgataatgataataaagacaataaagataatatacatataattggttttataaaaactatggcaaaaaatatattaccattctcacttgtcagatgaggtaactgagtctatattatttgaaatataactttaaaaattatattatctccgctactagattatatactcctggatgccgcaaaccacatcttctatgtgtttatattctcatagagttttgaatatttccttgtactaggaagaagttttataaatgtgttttgaattaattaatatccaaaagtgatggaaagaattataagttacttataaatttcttttgtttcaaaccattagatgatgacacttaattttttgggtataatatgatatggaaagactctcagataacttcaaaaactagaattatgcatacatacactcagatttctaaaaataacatgctatcaattcatcctgcctgccaggtatacaattcatttgagttttgcatgcgcgtttcaattgttcacattaaactgtattcatagatacaaattcacttttggaatcttgggtacttaaacaaaaacatagcctttctaatagaagtataaaaaggatactaattgatgaatataccaagtatctttccaattgcaggaaaccattaaaattgtgtctatacactgtatctcttttatcaaagactgtaacaaaatcaattgctatacatattgaaatatttatgtatctggtatgattacattagcttcagagtggttccaaatttaaattcccattggagaaaaatggagtgagaaatttgtacataagagagaagaaatgttttcttttttttgagacagagtctcgctctgttgcccaggctggaatgcagttgtgtgatctcggctcactgcaaccttcacctcctgagttcaagcgattctcctgtctcagcctcctgagtaactgggattacaggcgggtcccaccatgcccgcctaatttttatatttttagtagagacggggttttgccatgttggccaggctggtcttgaacttctgacctcaggtgatctgcccacctcagcctcccaaagtgctgggtttataggtgtgagccaccacacccagccgagagaagaaattttacagttagaatttatttggacacattttagaaatttttttcctgtaaaactcaagtttcatagtgtgtacgtgaatgcatctgtgtgagtgaacacctgtgtatttgtgtgctataaaaagatgaacacaggaatctaatagcataagtcgcaaggtaagagtattgtccaactaaaatagctaacttcagaggtatgaattactttttgttggtgggtatgattttaacattcccttgaatttattattgtaatatttgccactaaaagaaaaaaatcatggcttagaaataaatttaaagtaaccaagatcattgctatataaaccagaatttaaattgagggtttttgaaccattagggtatatttcccctctggcttaaatttgaaaactgatgaaattttagatctcagcacatttaatatgtctaaacaatactcatttgactgcaaaacctgtatatgtaatttccaaggcccagaagttcagtatttgaaattaaattgttgcatattactgagaaatattatcttaaagcatctgctccttctgctgttctaagttaggtgtgtatttctcgttagtgctcagtcgatgagtacaaataggcatgcagcatgagagcagagcattcatttcattgactgcaattactaacatgatttttgacatcttattcattgggagagtgtcttttaatgttaatttgaatgaatgggaatactttcacattcttaatgaatctgctcatagagtaaaataaaacatgactgttatgctttgaagatcaagaatcttcttttacacaaaagggtaaaaaaggccaaagaaggtgaagtgacactcttcatgctagttccaacacgagtattttgatgaacaagaaaaaaagccttctttagatgtaggtgaactgggtgatttggcattccttcctctgaattcccagggtattttgcctgtttttctttaactgcatgcaattcttgtcctttatccactgtttacaggtctgtttctcacaataggcggtgagtttatttacacagtgactgctgttacatatcacatgtactaagtctctagtgattgttgcttaacgatgactgaattgataggtcctagcatggctgatctctcacattattcttgtttggtttgggtttgggtatgaatggtggaaagagaaatggctggctctgagcaacatattacaatgggtttctagcatctactcctcacctagtactagcttagacagtgagcaaaataaaaccataaagcaggccaggcatggtggctcatgcaagtaatcccaacactttgggaggccaaggcgggaagatcacttgaggccaggagttcgagaccagcctggccaacatggtgtaaccccgtctctactaaaaagacaaacattagctggacgtggtggtgcacacgtgtaatcccagctgcttgggaggctgaggcagaagaatccgttgaacccaggaggcagaggttgcagtgagccaagttcgtgccactgcactccagcctaggtgacagagcgagactctatctcaaaaaaaacgaaaaaaaagtaaaagtaaaaaagctaagaaagcaaactatgtgttgtcaagaagtgtttatttttgcatcttgaatttttaaaggaggaggttcagatctatttgttagatgacacagggtttgtgaaaactcttgcagaccaatgaaatcagaacatacaggcacaccaagtgcagattgtgtttagagccactgttctaaaagcaggtgtaagagggttgcagttatatcccagataagagccttagggcattaggaatgaaaaagacaaaatgcaaacaaaagatatttagatatttaattagtaaaacttatttgcgcgggtaatgaggagagagacaaaaatagtagagagcaaatcatcaatactgacttcctgatttcttactagggcagtataggtgtacactatatatatatatataatattatatattatatatatatatataatattatatattatatatatatataatattatatattatatatatatataatattatatatataatattatatattatataatatataatattatatattatatatatatatataatattatatattatatattagtactacttccttttataaattggacagaaagcttatatgtatagaaagaaagatcaggctgggcgcggtggctcacgcctgtaatcccagcactttgggaggccgaggcgggtggatcatgaggtcaggagatcgagaccatcctggctaacaaggtgaaaccccgtctctactaaaaatacaaaaaattagccgggcgcggtggcgggcgcctgtggtcccagctactcgggaggctgaggcaggagaatggcgtgaacccgggaagcggagcttgcagtgagccgagattgcgccactgcagtccgcagtccggcctgggcgacagagcgagactccgtctcaaaaaaaaaaaaaaaaaaaaaaagaaagaaagatcaatattttttcaaatgtccagccaattgtttaagtaagttaaggtatgtaatctaaacttataatttaagtttaaagaaaaacattagaccaaatatttagccattttgatgtagccaagtttatgcttcaggagagttgcatagttatgaattgagctcacagaaatacaaatacacacgtcatcatagtgtgatatccagcatagatggggggcagttatcataaatcctgtcctaggctgggtttggaatgtgagacagattttataataataatatttcatctacataaaacagtccatttcctggactataaggatcatgataccatttgtttatcatggctacaaacagaacaggaagtagtatccttcaacagagaagataaattataacagtcattatttagaatatttgcaattcctttgtgtagggctattctttgttagctgaaataaagctctctgccttgattacagttatcattttgtgaaaatattgaatgagtttagattcctaaaggaaattagaagttgagtaaaatgtacattcacttagaaatttccttgcagtgaaagatgctgattactataaatgaagacagggaaatttcattcatttaaagagattactacaggtgacaagtttaaaattagccttaacttaaaagttggaaaatattttttcctgctagagactaatgccaactccgtgatgtatgtaaggtcatgttatcaggacccagcttattgctgctacctcctctcctacccttctcctcatctcttactcctaaccctttagccaaaggctcctatgtgcgggcccccaaactaccatgctttcgtgttgtcagggataagtcttcctgaaattaccctccttctccttaccaatcacttaattaattaaagcctggtttccacttcatctcaggaaaaattatttcctaacccctctcaccaatctccattgactccgccaatggaggttaggtatggttttaaagtgttctcatagcataagttcatcaaaatgcacaatatctttcaccatattttgtcaatttatttactttaatatgagaatacaaatatcttggcatgtttatcagtgttacacggatactgttattttatcatcatgtttcccacctctcccccatacctagagatgagcataaggcttaatatataaagttatttggttaatgctttttttgaataaacaaatacatatctaagggcatgtgagcaacagagttcattgtaacactatgcttacagttaatcatctttttgttattgttctagcagcaagaaggatatatatctatatatatatacaaaggggagaatgagaatgatctgaattcaaatataaaacattacaaatgaataaggaatgtattattttgctagcattgccataacaaaataccacagtagactgggtttcttaaacagaaatttattttctccacagtagtaaaggctaggtataatcagggctgatttcttctgaagcctccctccttagtttgcagaggctgccctctccatctgtcttctcatggtctttcctctgttcctgtctgtgttctaatctcatctttttataaggatactaatcagattggattagagctcaccttagtgacctcatttaaccttaaatacctctttaaagaccctatctccaactacagtcacattctgagacaatgggggttaggacttcaacagacgaatttgggaaaggggcaatttagcccataacaaggagccctgtcaaataaaacagctttgagagcaaacaaaaattggcatctgagtgaaatatgtgggaagaggaaaataacttggggctttgctgttctcttcccactcttcctgtgacccgactggttccctgggaaatggtctttggatccccactgctgcttaagagtctgttttttttcccctgagttactgaggactgctgtcagtatgattgtagtgcaaattgatcctttgtgggaagtacaatagcaactggtaaccacaaagtaccagagggcaaaagaactgtagacgggtaaataaaaggtgtccgaaaagagcaaagggctggaagaatgggaaaatggagaaagtaagatatgcattgagaagactgatgattttttaaaatagtagatgttagatagatgatgagagagacagagagagagagagagagagagatggttaaaggaaaactggtatttggtctgcagttttgctgtttcaccagcttaacaccctacagtgaataacaaggtcatagatcatcacaactgcagaaaacctggagaatattttccatttcctcattatatagatgtggaaagtgagactccagttctcagaaacagttagatacaaaactaagacccagctagttctcagccagtgattttcatatcataccacacgctatacagttgtaggtttagaaaaaatctatggtataagaggaccatgtagtaccttacaatgcttctgtaatacccacagcatcataaagagtaataaatttaattattgcaacttaatgattcaacaattgtatatgtatatacgtaattatacatatatatgtgtatgtataaaatctaccaatacatatgtaatgcacatgtataaaatctaccaattttctatatatgcagaaaacaacaacaacaaacagtattagagaaaaccagggaattaagtcaaaatcatcactcccagacctgaaataaatttcaaaagctcttcgttactggtcctttatttgtccttcctacctcattttttgccccactcatataccacacattgcaactatgctaaactaccttattttttttagaaaaggacatcctcctcatacctacatttgtacatttcctttttatttgcttttttcctctcctgttgccacagtaaattcctaagttttctctttaaggatctgtggcctgctttggatacagttgagtgtagtgatattgtgccttgcacatatctctagaacaaaagttattctgttatagaaattacttatttactatcacttaagatcatttattaccatttactatcatactctaattcacagaaggcaaaaaataaacccttgaatggcaagaaatgtttaggcaatgttgggcaaattgtttatgaatagtgattgcaattaacatagagcttcatacttactggattaaatattgatacttttgagtcatatctctactcttagcaataatattggtgaatattctgtgctgtaagcaatgtaaatcataaaaacattctaatgtgtatatgggtattgaatattcaatgatattaaatcaatgttcaattcatatagatgattcttttggaaattaagaaatggatcccattttaatgagttttccccaacataaactatactttgttaagttcaacttgacaatttacaacgctcacatagctttcagatgtatacttaagatatatggaaatgaaaagcaaaatgttgtgaacaggaggtgacaagatattttaaatttaatcatcatatcttttataattaaccttttaaaacatttaattggcattattgttagaaaactttagctctggaagctaaatctttagaattgttgacttgtagacaagtcaaatatccaaaataaaatttcacccatcattagcagtagatgtatctagggtgaaattacacgctggattacttcaatattcttatatttacatttttatttttttcaaagtttctccagtgagcattttattgtgaaaatattaattatattttaaacttatttttagtttaagatgagaagatagtctttggggtagataaatacttttaaatctttcatttagaagttcctggactaatattatccaggtcccacttccttaaaaaaacctaatgtaacctttcccatataagcattgactgctatttcttgtttcacaacatttatgtggtatgtctatgcctatggtattgaatatatatttgaactctgctggcctattcccatctctcacagatcccaagacaatagagatcatgtcttacccatctttgtatctcttacagaaaatagatctcaaattctacagaagatattgaattgagagtttgagatgttagaataagaaaaggcagtgaaaggagagcctacatgtagcctaggccagatttacaaaagcagtagctcagaatgagatagggattcaacaaggagaaccaaattatttggtagtaagttgttgctaaattgtgggagatgaggaaaagggaataatgatagcagactccctgatattaatcccccaagagtgctctatggcacagtaattattcattatgggccccctctgtttggccccacgcccccaaaaaagacttctttagtcataaaactgaggggaatactacatactaaatccccttagagtttctcaatgtaatgcatatgcaaagatgctctggaatcctgcaggaaagacagctgtttaacttttaacctagtttcccaaactcatttcaccatggaacttctttaacatgcagtcaataaatgcccatttatctaatgtttaatgaagcatatgttggaattcttaaaattgttaatagctaatcaccgtgaggaactggtgagatgatggtaacattaacagaagtagagaaaccaggaataggatcaaaattggaggggaaggggaaaagggccttttgttttgagacatcaacttagaattgttgatgggctatccaggtgggtagataataaaagtttttgtgggggaggactaaaactaaagagttagacttaagagagaaatacttgagaatcacttacatggagatagatgatagttgaagttaaagaagagaacgagatttctaacggagggaatacactatcaaggaaaggattagagaaccctgggggagtgtgaatatttgtgcctcatttaattttcagaaccagatcatgaggaaagaatacttcccattttagagattaaaaaacaaaaccgaagcacagtgcttaagtaactttctcaaggccatataactaataagtggcagatatgagattttgagccctactctaaaacttgctcctcaatttgaatgtttacatatttatgtaaataatatattttacaatattaaaaacgtttttgtagagatacaataaccatataattttacaggattgtcttttttatttacgtttttctttggagtataatacatttttaattattggcctgagaagaagatacaatagattatttttggcaaatggtgcactcattcatgagagacactgtattttctaaagcaggctgatctctgcataatactggctccctgaaaataaatccttgctgggccgggcgcggtggctcacatctgtaatcccagcactttgggaggccgaggtgggagcatcacgaggtcaggagttcgagaccagcctgaccaacatggtgaaaccccatctctagtaaaaatacaaaaattagccgggcgtggtggtgcatgcctgtaatcccagctactcaggaggctgaggcaggagaatcgcttgaacccaggaggtggaggttgcggtgagccaagatcgtgccatggcactccagcctgggcgacagagcgagactctgtctcaaaaaaaaaaaaaaaaaaaaagaaagaaaaaataaatccttgcaatttatctgccatattgaatttgttctggaataatggggataaaatcaaaataggaaataaagtatcaattttattccactattattttatttattattttcatcttagtcatatggaattatatttataggaacatgttaaaatgcattttcaagataattattgcacacaatttaaacaattgttttgagtgactttttgtagaggtagaacagttctgtaaaattaaggtttggctttgctttgtttgacctagattccctattaatttcaaaataaatgtgccttatatttcaaaatcggatttcgtatatgaaagctcatgtcagttcacaacaaaaaaaaatcattaaaaaagaatagtgcgttattttattactgttttgatagcaatacctgaggataccgtaaatgtgtgcatgtacttttgtttacaaataaaaaacagttatgagaagacaaaaaaatctaatgtagaataatttattccactaaaacccagctttcctcatggaaatcatgcaacacctagtgagattatgctagcacatagggaaatttcacaaatgcacattcttagacatattaaccttctggatcagcattcaacaaaggtaaaataatgtacgctattgatatcagactccttagctccctattctggctcccttttaactatcaaaacacagtaatctgtgttttccttctttgtacatcagttattgtacctgccactctttataagcattcacttttctcttgtttttaagcacagtggtagcaatggccatgacttagaggcttaatgaaatgaaggacagattataaacaaattaaacccacactgctttctttatagaagcagctgcagagtgttctgaggtttttttttttccttgttgagtaaaggaactaataaggaaaatttcatggcttcaaggtctagagataagaaatgaaagttgtaacaggagaggagctgggaaaagcacagaaatgtagatttcgcggatcatgatgaaagccacaggtgacttggtgaccacagaaatgagaacacagggttgggtgtctaggcaggaagttgggaggctggtggagtcctggttcaactctaaagtctcagttatctcagcacatgctcttgtggtgctgctgagatttggctgattgcctaccccaaacctaaaaatagccgagcctcattcttttgtagtggcagccagaggcgcagctgtgtggggactggctatctttttccttagctttgacaaatagctgagagttggtgggcttgagtgtgcacctgttgagacagaaagtgctgagtttagttgacaacactgctgaaggtaatttcacactttcattccaattgatcaccgaaacttagaaaaattttctccttttctaaatccttctccttgcccatgaatatatacatacatatatttttctcgaactgtttgagagtgattgttaccaaaggcaattgtttttaaatcagaataacaaatctcctgtttgagtggctaactcaaattttattttcttatttaatttagtagaatttaaaagatttaaaatagttttgaaattaggaaataatatttttattcccataagtctaaaggtacaatctagcccattacatcactataaaaaatcatctccatatttattagattacaggatattccgctttaaactagaatttgcgttgcatacatttttgcagaaaaactcattcttaattttttctaaaacagtagattggatatgtgttaaaggttcatgttctagtacttctttaaatgcttattgtcagctttataaaatcattttatcacaaaaagttagttttctgtaggcttattttccttgataggattccttctcttacaaactggttatatgaattaaaatgtaaatgttagtgaattgtcatatcttgtaaatatactagggtagaactgatatctttatgcaaattagaaaaatattttacagtatcagttatggagttttttttctactcttcctttttctttgttaatattggcatgtgatgaaatcactactttataagtttgctactttgattaagactcagaaatcagagtggctgggtgtggtggctcatgcctataatgccagtactttgggaggccaaggagagagaggatcccttgagcccaggagttcaagaccaccctggacaacagagtgagacctcatctctacaaaaaaaaaatgaaaagaaatgagccaggcatagtgacaacacgcctatagtcccacctactcaggaggctgaggcaggaggatcactggagcctaggaggtcaaggctacagtgagtcatgatctcaccattgcattccaacttgggcaacagagcaagattatgtctcaaaagaaacagatcaatcagagaagtaactttaaatattttaatataaaaaaaggcaacatctcttagcaaataaaaatagcgacgtccttctctttctgtaaatctatccaagacatgagtgctgttatcgattcggtttagggttttgttttgtaatatttttttcccctttcacagcaatacattttggggtatggtttgctgacaatattttccacagtaatcagtggcttagctgtaaatagaggataagtattgcatctggggaatacacattagaaacaattggtatttctggttcatataaaggtggaaaaatacttggccagatgggcacttatttatttattttcctgaccagaaataacaggcaatgtgtgagaaagtgtggaaagcactgggttggccgtcaaaagcaggatcttacaaaggttgaaggaagctaatctgctgagaggttttctttttttaatgactttcacatagtatttttcaaagcctctgtgcattaacactcacgccaaaggaaatgatttgttttttcaagcacttggtcagtgcaatagctccgcagctaataatgacatatggcaaattttgagtacttactttgtgctacgtactgtaataagagctttgtgtatattatgtgagtaaatacttaggacaagcctgtgagagagctattattgttcccattttacagatgaagaattctgagttagaattagactttgaaagtcaaactttctccttccctatcccttgctgttatccaccacatcatgctacctccctgagctcagtgattacctacaatgaggtttaccagcttgtcctatagttacctgtgttataactgccatgttcctgaaataaattaactataaaatggtgcccatcgactgatatagagaccagtcattttttttttatagttttatctggcctggggttatcaagatactaggtttaatagaacttacttccagatttaaatgtctttgttcattcatgaaaatcaattgattggatccaatgattttagatctagacaactgtcagtcatgtaatctaactaactcattgtttaaagaggcaactgaggtgctgaaactttcaataattggattaattttatctttagtcagttatatcattagaacctaggtctctatttcttaatctcaaccaaaatatacatacatacatatatgtgtgtatgtaagcaccatttctgctaatttacaaaaacctagcaaaccagtttaagaaaaaaaaaagtttcctttgctcatgtaacgaaaaagtgaagaggtattacttacttcagatacagttagttttgggatctcaagtgatgtcacctagcccagtacctctctcaccctttctccactgtgttttcaaaggctcttaaaaaaaaaaaaaaaaaaagctcttagacattatctctcgatatgggacccattattagtcttagacttatatcattgtacctcaattccaatagaaaatgaaaacaccattctctccaacagaagacctaggattacttgtaattgactctgaagaaatcacctacacattcctgaatcaatcaacctagttcaggagtacagtgttctgattgggcaggttccatcagacacccactcctggaaccagagccaggtaagttcaacccaaaactgtcagagaggagcaggggtgggtaggccacaacgaacagagatacaacaagacaaacagtgaagaagaagatgaaatgggtagcaggcataataagattataaagtcttgtaggtcccaaactctgtgtgtatgtgtgtgcatgtgtgtgtgcgcgtgtgtgtgagtaaccctcaaaagtatacaagtattgtgcttcctgtaatgacagacacccttctgttgataataatgattcatgtagcccaagaatataagaaagtattctgtttgtaaaataaatatttagaatgggaataaatttgtataaacagaagcatgtttgattttctttaaaaagtgcgtgataaatatgatgatcccaggaggtttgttcgttatttaaatgtttaaacatgtgatatgtctctttcagaataataaatagtagggaatagcaatatagcacttttcggccgggctcagtggctcacgcctgtaatcccagcactttgggaggccaaggtgggcagatcacttcagatcaggagtttgagaccagcctgaccaacatggtgaaaccccatctctactaaaaatacaaaattagccaggcgtggtggtgcacacctgtaatcccagctactcaggaagctgaggcaggagaattgcttgaaccctggagacggaggttgaggtgagatcgtgccattgccctccagcctgggcgacaagagcgaaactccatctcagaggaaaaaaaaaaaaaaagcactttttaaaaatcataatggatttctaagattgtaatagttttggtatgctgattggctttatttttggctacatttattttagaatctctgcattatcaatgaactttcattcaatttcttttctttctttttttttttttgagacggagtctcgctctgtcacccaggctagagtgcagtggcgcgatctcggctcactgcaagctccgcctcccaggttcacgccattctcctgcctcaggctcccgagtagctgggactacaggcgcccgccaccacgcccggctaatttttttgtatttttagtagaaacggggtttcactgcgttagccaggatggtctcgatctcctgacctcgtgatccgcccgcctcggcctcccaaagtgctgagattacagtggtgagccatcgcacccggcccattcaatttctaaattaggcataaaaacaaaattatttcgtaacatttctacaatgacctcctttttctgttaagtttctaattctgaagacccaaattcaattttatatttcagtatctcacactgattattctgatagttacattaaatccctcgtttagaaactgatgcaagttactgttttcaaatgttcatgctttgaaagtacatgtttgtcatctgatttcaaatctgcatggttccatgctgattattttagataacttcaggctgtactccaatttttttctgagagatctctgaagtaagcttttcttactctgttacaattttaatgagatacattctatgtattagagtgtgaaatatctctttaggacaaaatttaatcatagtcagtgctccttatttaaaggctaaaggcatcatcaatttggcaaaaaataaacaacactatctggctgcctgagggtccagtgactgaccttgagttgaaatcccagctgcctgcatcatgtgaccatcaacattctgtttttatcccagtggtaataaataccttatactcaaaaagacaagagcaactcagaagagagatttggtacttttcaaagaaacgcagcagtaaaagttgcatgatgcttttcatttcaaagcaggcaaacagagctttattatggcagagcagtccaatttaattttcacttgtgtgatgaaactattccacacgtttgcattaatttatgagcctttgtctggttttaatgtatttaataatacatttatacactctttgttttaaaaataatgatatgttttgacaatgcactttttcaggaaaatctgaggtgtaacaaaaagtgataatggtaagatagttcccattttgagtattaaaaaatgagtgcatcaggtaggattgggtttggctgcgtgtatcagaaatccagaaatagaagtgtgttaagtaagagagatttgttgccttgccacatgagtgagctccagctggaagcagtacattgccggtagagcagggccatggtggtcaaggacccaggaaccttccatctttctgtgcaactttcggtcttcgatgtaacatcattgtctaaaatggctgctggacctccagcctctttccaggtgtcaggaaggactccagcagagtgaaagggtttgtccaatttaagaagcgccctttacacagctttcctccaaatcccactggatatttctgcttactttcccttgcagtggattatgtcaaaatagtctaattccttcttttataacaattggagttgaaagctttgtttcaatctctagtgacaatactttagattctgattcccattctctgagggcatacatccgtgttactaggttgttactaaatatgcatgaatcttaactcaagttttttaaaattccagtttggaacccttggagaaatcaatacatctgttcgtattttgcccaatagtctctatgagtgctttatctaaaaatcataaattcagatacatttttaatatcatgagactaaagaaaatatttcccgttgtcaacagatatcaagtttcagttataaaaaatgagtaggttctggatatctgttgcacaacagtgtgcctgtagttaacaataccgtattgtatacttaaacatttgttaagagagtagatcttatgttgtcttcttattataataaaataaaataaggtcgggcgcggtggctcacgcctgtaatcccaggactttgggagtctgaggcgggtggatcatttgaggccaggagttcgagaccaacctggccaacatggtgaaaccccgtctctactaaaaatacaaaaaattagtcgggcatggtggtgcgcacctgtaatcccagctactagggaggctgaggcaggacaaccacttgaaccagggaggcggcagttgcagtgagccgagattgcaccactgcactccagcctgagtgacagagtgagaccctgtctcaaaaaaataaataaaacaaaataaaataaaatttccgtttgtatactgtctttaagacccaaatcaattctctctgactctagtgggcactgatatgttctactgaagtccccatcaccaggtagcacacccatcccctagctgctgggagtgcttgttgcccacagctgcttccttctccagagacttgttcttaccctgaagaaagccaggagcctgaaaggccatatgtgccccacctcaggtcagtttgcaaccaacgactgaaagtacaagagtccaacccatttgccacaaggtgagatcagctctgggatgcaatttgccctccagagctccctgtgggatcatgtggaaattggtctctaggtgagatcgcattcttgttttgttttccccaagccctaaactgtccccttcacacagtttctcttttgagcactttctctttttattttattttttgagacacagttttgctcttgtagcccaggccgcagtgcaatggcatgatctcggctcactgcaacctccgcctgctggattcaagcaattgtcctgcctcagcctcccgagtagctgggattacaagtggagcgccaccatgaccggctaatttttgtatttttagtagagatggggtttcaccatgttggcaaggctggtcttgaactcctgacgtcaaatgatccacccgccttggcttcccaaagtgctgggattacaggcgtgagccactgcgcctggcctattctaattttcatcccttcactcacaaatgctatgttccatcaacagcttgagtgtgcacatgagcgcacacacacacacacacacacacacttctgtgcttgctttttcgtggctgcaaacctgctctcttgtgaatccctgaatccacgtatgaagccgaagcttttatttcattttattttttagttgacaatataattatacgtatacctggttttttttttttttacattaactcttctccttatttcagctgagtttctatttatgcacaatatttattgttccgactcaggggaagtttcaagacacaaaccttttgacagcctaaattagttcaggtctaattcagaaacagaagtttccagattagaaaacctgaagctaaagaagtgcttgaagaggaacagggattcatgcaaaactagactaggtaacagagttactcatacacaagaatcttggcaagggttgaagtgggcatgtggaaggggctggcttgaaaatcaggagggtcagagaaagagctgttattgttaccctttgttcctcctcagatgtctatgcgaaaggctctctgagatgagagcacgatatagctcatgccggttcagccacttaatcttttttgatttgactgcacccaggtttctttaaatctgagctttagtttccttaactgtaaaataatggaaaaattcctggcccctcctcacctggttgctatgaagattaaatgagataatatatggaaaagtcttagcatataataaggtctggaacatgatatacatttaataaaataatacattttacttattattatcttatacctttcatatgaatgttaactgcaaaacagcatagccggtatttgctccttcacaatagaaggtaatatgcttccctgttttactaatcagaaaactggcctcgaagaggttaaattcctttcttagaactattaagaggctaagccacacttcaaactcaggtgtgtctgactctgtagtcaatgttcttttcacttcatggtgcttttttcctgtaaagtgagtataatatttcctaaatcataataaagctttgtgcattggatgacataaatataaagggcatagtgtataattggtactcaataaattattccttttcctccttccctaggcaagaactaattttctttctttgtttagcccctgtattaccagccaagtgccttgggcataatatacgtaaataggcctagtatgttgaattttaggcagccatcttgatttttgtaacaaatctagttctctttaaactattgcttagctcttccaacaataacaggccttgtagttatcccacatggggtgatttcaaagccacagagggaagattgttcttaagttactcctgcatgcagtgtcaagctctcacaactttcacaagaagttaaaaactacaattttatgtcagtctctcctccagtaatcagatagcttctttgattgttctgataacccaagagggaatccttctgatacagaaggtggctatatctcatatattttgcaactcctcccaaaacatagatcgatcatctcaaagaactacatgggaaacttgatagccttttggaggctgagaaagaaagctaagccaaccttgaaggaagtcaacaaattgtcaatggcattttgaaaaactgcattgcaatagacatctacactcatacgttatttagctcccttagggatatgattactcttggggtccacaagattcgatgcatgatcatttgagaatatttgtggctactattattttttaaacagatcaacaggcatgacagaatttcatgcatgaatttcatgataaggcattctcaattttatgttttcacttaagtgattatctctaatgttcatctatttccttcttatttcaatcctaccctagtttcaacccatccttttttatttttttcttgtttgaagtttaccctaatttcatgactgagcttctctaaattccttaattaagtcctccttgtccatcccagtacaaggtgtaatcactttcccctatatctggattgttcatctggttgttatgtattgcattaagttaatatatgcaaatataagccttgtaaatacagagaccaatgcagtccaattttgggtagatgccacattcaaaacaacaataacaaaaattaattaagtagtcacacacttaaataactcaaaagtgttaaaacagatatgaagaaatccacagcaacatttattataaaattactctttctcttccttggttttgcggcttctcgagttcataggagactttcagtttccagtgacctggaaactcaccattcctcatcaccatcctttactgtagtaacttccttttacctgaccaccctgcatagtcacagaagatgcactcctgacaagtgatcctcaaaacaggtagtaatctctttgagaagtgtgaaatgtcttttgttctccttgtcgttcccatgattgtcagctgtgaggacccttgtcattctaccctcaatcccaattctgcagggtctggggattctggggattcttttttttttttttttttttgtagttaccaatcttatatagatacaataatttttatgtgtattgatgtttattgacaaccagattttaaggtccttagaaattggagttaattattatttatcatccaagctcctttccctctgccctcttattttccaacacagtgtcttgaattttatcactttatcgtttagttattaagggtgatttggtgaaatgtagaacagactatatgaattacctcagcttatggtattatatgacataataacagaaacataaatagactatcataaatcttaactttttctttattctttgtaatattttattagtcttatccatcttgcttggattgccaagttcttctgagaattccagtaataatgttatcattctatcgagcttattattcccaactgatcttctattaagccagtatgaattagctactgtttatgagattagattatgcactttaatctctagaagaagcaaaagtaatgaatacactgaatctgccactgagaagacactttaaactgaaatgtttcattatttttctaattcctctctcttttgaatctgagtatgtttttggggtacgatacagtgtaaaggtttttgtacatcaagtcatagacttggaaataaaacacaaacaactacccttttgatgaaaatacataaacatcatagccatttagccaacttttaaatttaaaacaataaattcatgattttagttggagggtaaacatgcatctttttaaaaatcaaatgtaaacacagaatctatactcatgatgtacacacatggacataaaatattgcatatattttgggagattcaaagaccactggactccaagttaaggatatttttctctaaataaacttagtgattgaattatagaaaaccacaaactaagttattgactgaagtataggaaaagtatagtgtattaaaataaagttttggactaattaacatgattttactaatagtgacaagaggatttaccaagttctgattttttctaatgtaaaaaaaatttgttaagtaagatctttcaattagtaatttctgaaaccccctctaagtaaattaaatttttatatccttgaagaaggatgttgatcagtctcaccttatggcaagtatctcaatatatgtgatctgtcacctagtcttttctctattttattatttctgtgtttgttgagaaaaaaattatttgtatacaagtgcatgtactatttaatgtcatgtaattaaatccctttgatagaaacagttaatgttagactaataatgtttttagctactggtgaaatacttcctcctaatgcgttaaatgcaggataagatcttacttgatactaccacgggagtgtaatctctcccaatagtgtttgtttcatcgaagttggctcatttaggtagtttgagtggccagagttgtataagtatgtttggcagtggtggatggggaatggacagcaccaaaccattctttctctctgtttcgatttttctcctttgtctattgctagttgcttattcctgagatatccttcacctctctcaagaggcttggtcacttaacttcattccaactctacacctccattggtggaaatggaaagatggatgaaattttagcccctgtttatggccagcatccgactagtccttctttcaaaaatgagtaaataaaaacttattatggtatctttgaaaagttgcctgtctatgctctaggctttaactcaataaattattttaatggaaactgtgaattcaaaggaaataaaagtatggcggggaattatgcagaaaatactgtaatatatgttgataaaattttcccaagttaccacacctccagtacctagaacatagccagccatataatagacactcaataaaggtttgttgaatacatttgtttaatattcctttttactcttttcctcccctcttctttcccatgcatttctagttactcacatttataataatatattcagtacattttttgtttgcgtcaagatgcatcatgagggaatcacctgaaatttcaagtcaggatgacctggttagaacatcagttccaaaactgaatatttagagatccttttcctatctataaaattggatcacaaaatatctctcaaagggtacaaagcacagcaccaaccatatattaataataaggcactgttacataaatgtcagttcattttctcatcaccttcttaaccattttgctctctcttctgtttcaagacagtaaaatccaaatctctgtcagtaaaagtatatctgaccactctaatttaataaaatgcagcaataaattgcatgactcatttctcaattattttgcatgacttactaaaagtataagacagggtacctgagggatctgtgagggaaaggaagcaaaaatcatatacatagaagtggttggtttcaagtgattaagaataacctacgagtaggtgaaaaaaagaatcaggacaatacaatagactgcaaccaaaggtggaaaaaactgtaaaagaaatagctttagaggtctcaaatctgctttcagaatgctaggatctagttttcgtaaattagagttctcagtaaatgtaggacaagtcccagctgtactactgtagcattaacattaaaactaagccatatcttgaatctccttttctcttaaacccccagaggtttcaaaccagagaggtggtcaaaatagattcccctactacttcccctttctcaataagaagctctcatctgttgaatttccattttgaggcatttagacagctgagagagagagagagagtttaaaggagtgttcaatccatctggtctgttttttccccaaattgcggaagttatcatttcagtaacattatatgttgttaagcttatacaataagatctgattttaaaacttaccacataaccacagcaacaaatattgtgttatattgtcagaaggattgacacatagatcaattgaacagaataaagagtctagaaacatacccacacaaatatgcccaacatatttttgacaaagtttcaaaataaattcagtggaggaagagtagtgttttcaacaaatggtgctggatcaatgggacatccacggacaaacaaaatgtacatagacctagacctcatacctactacagaaattcacagattagagtgagattatttttctctttcttacagaaatcacatccatattgtctacttctgtgaagttcagtatggtagccacttgccatctatggccattggaatgtagctagcatgaattgagaggtactataaatgtaaaatacacactggactttgaagacttagtgtaaaaataatatgaaagatctcaataataattttatatgcgttgcatcttgaaatgatagtatttgggatctgtttggttaagtaaaatacagtatggatgttagttttacccatttctcattatttgtaatgtgggtatcagacaaattaaaattacctatgtggcttggatcatagttctattgctcatagctagcataatctataatttccagtttcagtttctttatatctgaatgagaaataaaagatatttgtgaagcaatctgcacatagaactaaagatttttattatttttaataaaattttacatttgtctgtccaagcatttgaatcattttgcaaccatatttattgattatttctacaacattcagtttagattttgcataaataaaaacttttgtaagtgtatgacttaataaatattaagcaggatctagtctagttacttgggaacggcaaagccctcgtcttcatggagcttacatttttcagttgataatctttatgtaactctagaaataattataactggcttaactaagttagcttttgggtacatactcaacttgtgagagcggaacctcatgggtctaccaatgagttgagtattacctaaaagtatccatcttgccctgggcattagccaatgtacttttcagaggaaatgcagggtgtttgttaatctggcaaattacctgagtaggcattggttacatggaagtctattcagagattttcctctgtactacgttgtattgactgattgcttttctgactttctccctagattctgaattcatcaagagttctaggaggggggctagcgattaaaaaaaaggacacattaggtacaatataccctactcaggtgacaggtgcactaaaatctcagaattcaccactatagaactcatttgtgtaacaaaaaaccacttccacccctaaagctattaaaattaaaaaggaaatacaaataaaaataattttaaaagtttttgctgcgtgttagcacctatgtcagtaattggtaaataataagtgtaaataaaccaactgatggatgaaatattttgagagaacattaattcaaaatttaaaccagtcaatgtcacattcaagccagattgcccaacctagtatatcatgaccattgacttcaatctttaatatggattgtctaagtcattggctggaagggagcatctgtctttgttttgtcctttgaagcaaacacttgaaatcagtttagactctcatctagacatttttgttgtttagaaatatatttaatggaatctttaggctagattcagaagagaagtaagctgtcattacccaaggattgttaaccttatcaataaattcgtagccctagggcataaagatcatttgtattgtttcagaggccttcgtgtctagtaaattttctagctattgatttttgcaaatgtacaaaattaacaattgtgagagagcttttaacaagcttgatttcagttgaaataatatgaacagtaattgttttttttctgttcattgggtaataaaagcatgtatgtaattgggaggccccaatactgttgaaggtaaatctgatgagaaacaaatattcaaagactttgtgcatgcaagagaatcaatagaggcaaaaaaaaaaacctatcttctagagagttgacaggaatctatcttatttggaaattcaaaaggtattcatgcatttctgtgttctgtgccagttacattatttatataataaatgcttttccatattgctttttatttgaaattctcaatcctataactaattattttacttagggaatataactgtatcctttacgccttctctttgattttgtcaccatgatcatcaaaagtttctccccatcaataatccaggtagactcccagccacactcaaggcatcatcaatgatctcagagtactacattggattaattactaatttttcctcattgacttctgttttccacaattcaatatttttctaattttcatttatctgcttgcttcttcctaaagaaggctcatgtaagtttgtatatgtgacaccaatatctctttaatatgtttaatttccttgacgtttctaaatagggttaatttaaatttaccttaagacccaaattatctgaatgcaagtttccaaaaaaaaaagctatatatcaggaattttctaggattcaatttcaaaaacaactttcagagtatggctaataattcaaaggtcaacaaaacacctgagcccactacaatcccagtaccatacaggtcaaaatcaagatttggcaggattgtaggatcccaacgttctttctgatgttaaaaaatatatagtaaataaagttattttttgttcaacagtattttggaagtagtaattgccacattgtatatatgtttgccattagccataaacgtgattttaccaatttattttcactacattgtgcagaattccggaaacttagataaaatattttaacacctaaatatatacacacacaaacacacacacacatgcacacacgctactcttccatgcccccaatctttctctttatctcagagttcaagtgtagccatgatttgacattacaaaatagaaagagtactgttggtttacctgtcaaattacttttatcaagccattaatggtgcttactgtgtgccagacattttttctaagcactttataaatattaactcatttaatctttataaagcctttaaatgatatatgataatattctctctttacacaaaaggaatttaagacactgaatggttaatgagcatgctgaaggccacaccattcataagtggtaaatgggaagtgactctgggccattttgttcccaagtccaagcttttaaatattttcctctgctcttactagacatgatattgctgagaaaagttttggtcccctgtgcttgaatataagtataataattaagtcatcttcttttccatgctcaaattttactctcaaaatcatttttctgtgccacacacattttaacagtttttcattatatacttgttcttctgagtagaaattgactctaaaatacagacaaaaagaaattatatttaagataaagtaaaaaaaaattctgggtgaaggatacattagaatatgtgattcaatttttacaactttcatataagtctaatttctttcaaattataaagttaaaaatctttcaaataattactagtcgaattgaagaatatgaattgaagcagtaccatttagtgcataaattcaaggacacaattttcaagttatattttctatgaacagtcctccctgaagttgtgcaaggagaaagacctaaatcgaagttagtttacctacattaaaatgcataaaataataatagaaaaataaactgaagcaaggacaataatatggattactctccagctttcataactgtgtttttaaatgttcttcagcagaaattattcaagcgttgtttcctactacagaaagaattctcaggacttctcagaaatacgtcagtttttaataataccaatacctgataggagagcagggacaatttcagtgtcattcatagatgttgtcccagaaccaagacagcatctgctccatagtaggtacttaatttgtggaatggataagcaaatcagtgatacatatcgatggtgctttttctactttaaaccacttttaaatgtgttaatatcccattaatagccttctagatttatttgagtagaaattaattcttttatttgatagactagtaaaaggcagcctagacagtttaaattgctcattcaggttcactcaatgaatacacactgaggaaaaaaaatatatatatatatatgtatgtatgtatattcagaaataaagcccagccatgactttttgttcaaggttctttgtactatattccattctttgaactgaaaagaggagaaattatagaagaagcaatgttttaaaaaatagacataaatgcataaatcaggtaacacacttttttggatacataccccacaatacctgaaaaagtagtaagcaaagtcactgatatttaatagaggaatgatctgaaaactttacaaatcaaaataactttgcgctttcaatttttagaaattaagtatttctccttactgaattcatccgtatgtagaaaattatgctgtattatttcaccataagttttaatttaggagtatgggttattatttggaaagggaaatgtttctcaaatttacttccatgttttaaagaataatcctgttaatctctttctcacatcttctcatatatcttatttcacttttaatttcctgtaagcttatcattcctgttaaattactccttgccttttctcagcgatgattgataatgatattgttgagctgtgtctctttctaacacctagactactattcaaactatatcaatcactccattatatttttaaaacctagaatatactactgagatctctcttgacctggtattcctgtatcctgccatctccgatttcccacactgagcacctttccttccttcagcatcctttccaatcagttcagaaagctgcccttaatctgctattctgttgccaaaacaacatcattaatcactttcagttaccttctttgcttcctatacatcaaaacttgagcgcttcctttaccctcagttactgctccactagagctttcttgttttaacgccccatcttcttgtcctgtgtgttttggttttcttcctcttcttacttgatgcccttgttttctttttgtgctattattaccttcattttattttctgtgcatgagcattgcaaattacaaaatcatctctttccccctttgtttactacttatttggttccggtacttcttttattctgtttgtataaatatgtactgaaagcaactgcggaaaaaacacctagatgaattgtgatcctatgtcgtcccttagctgagaaacatttcattcctgagctgtattatttgtcttttctctgaatacatttttttttcatactggctattctcctgtatattctaaacacacctttgtgtaatttaggtgaaattgttggaattataaattgtttagttagtagttgtgaatcatgcttactacagacatgtattatcaaaaatttcacaagaaggatagcgtgatactcaggcactccccacatttcctcaagccaccaaagagttttttgatggatgttcttgtttattggatgctctaaaactagacagacagtaaagattatcttttcctgctgctgaagtttaagtcatttttcccctaacttttattcacacttccaattatgaacttctaacacataaagaaaattgagatttttgtcatgcaatgctgaaacccaaactgacatgtaggaggaaggagcagcagttctgtgggtttgtcaggatgctaaggacatgttgtttttcaaattcgttattagagtcagtgagtttattaggctgaggtagaaaactgtatgctattagtcaaatttaaactaaattcctaaactcaagtcccttatagctcaaaatctgtagattcaagtaaacacttctagaaatgtcctaatatcacattgaaggagatgttcaatatgattttaatttagctgtctaagtctgtatgcaaaaaaaaaaaaaaagaaagaaagtaagtaaagcaaagcaaataataacctcaagtgccaactctaattaattggtagtatcttcttgaactaaaatgtggagaagtcccatctggcctctgtaggagagtgcaatgatctattagccatgctaatagatcagcccaggagaaggaagagaacaggattgttgattgcctgtggaccctgttgtgctagaacatttttcgtatgaaagtctgcatttcaggtgtggtaaattgtttatcagaccacttattttctgatgtgttctactttatttctgatacttgattaaaggtatgctgtgaaagtagtgtagtaataatgactcctaaaatgagtttatgcctctgaaatatagacacacgattcttcttcaataactctgcttatctgcttttagaaagtaagcccggaagtttacggactattgcaatattagattttaccatgtgtgtttattattgataatctaaaggtgaatttattaagctctacattggctaaggagccaaggctaaggattacaattaaacagctcaattatatttagcaagcaaataaaaccttaaattataaagcttccaatgatagcttaaagctcagaaatggccagttttttaaactaagcaataaatatatttttaaaatatttatttctagtgttacacagatgaatttggcacaagcttttcacttccttttgtgaaaaacttgttttgtgcatattccgtccactattttgtgtgtaatactctgtcatatcaaattcgattaattaaacaacctttatgggcatgaaccagccttggtctataacaatttgcaacttcaaagagacaaagtgattttcaaattactgcctaaaaatctatttaatatatataaataagcagaaaaaatatctatagtctttactggagaaccatgcagtagggtggggggagcatatggattttattttggcaagtgaagaaaaaagttattaagacatacaatacaataaaaaagaattcacaacatttagcaacagattggctgtgggtagcagaggctcatgaggagtcgacaacaactttctaagatattggcttagaaaacatgagtgggttgacttacatgttgttttctggagttgagaatgtttttactttgaagaacttttaacctcctctacaagactttttagctacgaggtccccttatcactatgagtaagagaggaatgcaattctgagcagatttctcctaaaactttatatagatagatagatagatagatagatagatagatagatagagatagatatagatatatatagatatagatatatacacatatacatatatatatatatatatatatacacacatatatatttttgagatggagtctcactctgttgcccaggctggagtgccgtggcacgatcttggctcactgcaacctccgcctcctgggttctagcgattctcctgcttcagcctcccaggtacctgggactacagtcgtgtgccaccatgcctggctaattttgtatttttagtagtgaaggagtttcaccatgttggccaggctggtctcgaactcctgatctcgggtgatccacctgcctcggcctcgcaaagtgctgggattacagacttgagccatcgtgcccggcctgtatttttaaaagttgtctttactgaagaggtctgttctaaacacgtattctgtgaggatttgattccatcattttcacacctgttactggcctgacatatcacaatgttttatgagaaaatagaaatgttatgaattcatttttaaattgtatatattgtacaaatttgtattaagcgaagccatggcaggatagcagtctattatttgccttctgtgcactgcagagttccagcagaggtggactttcctccagtttattagagaattttaaaatgtcaaacttcagtcaatagtttatgctgtttctagacctaatataacaaataataacctaatattgcaggtcattttcagaagcagtaaaatgctattatcctactaaaaatttttggagcacaatcacatgatatgaatttcttacacaagcatataagcaataaaaattttacagaatcttaagtgaggaaaaatttgaaaatgctaaaaaaaaaaacagcataaaaacagagatcagaaagtggctttgataattcaacatagaacagcctttagcttttgggctatggctctcaaaatatccaaaaccagttatttttggtgtgtgcgtgtgttttctgattctatttgctcccactcttccaacagcagtcccctgactcttccaatccctcagactcaaaatctttgagtcagtttcaagtattcgtccctttttgtcaattcccattaaatctgcttttgacacatctattcacttttatctttttctaagtgctatcatcctagtgtagggcttcatctccattttcttactaattattttttcaactttcaaagaatcctagaagtgtacacttattaaaatgcatttcatgctttggccctactttaaagcctatactgcattgatttgaatatacacttcggcagtcaacgtccctaaccatctgatcataagctaattattaaattggtatttgatattttaatggcacttgaaaatttcaaagtttccacagttattttattggattttctacaaaaccatctgtgccaggtagtttttattacctatctcttatccaagaggaatataagattctttgaaatttgacaacttacagactacaaatctagcaggtgttagctgtggaacttgaactcatatcctcagattctaaaacagtgtcttagtcacactacccccagtggcttccctctctatccaactctcactgtccagatcatgttccataaccagagttacagaacaattataattaccttccccatccaaaggcttactgtgccacagctcatttctagctgaaattatttcattttgagagatgaacttggacaattaattttggaaatatgaatgcaaaataacttagtaatttaacaacttcagattagtgtagggatagtttcaggagtaaattaaatgttgttgactaaggaagagaaagagaaataatgtgataaaaattattgaaaaggggtatacggtaagccttgtgagataaattctctctactcttgggcttattcgtggtagacatagagctcagaataggttttgtgagatgggaaggaggaattgtatgagctgttattgagagattaaaggttattctgggaagaatacatgtttcagaaacagcaaaaggtgggctcgattcctggttgtcactcattagtcacgtaaatttggttgtgttgtttaacctttctcaacctcagatttatcaataataaaatgggaataacaatatcaccctttctggttcctaaaatactgaacataatatatataaagagttttgtaagaaataggcactcatacataaaaaatggttttattctctaccagcatttgaccttgggcacattatttaacctctctgttcctcaatctacctcttctgtaaacatggggaaaataacagcacctacaccttgttggactgttgatgattcaaagagcagccgccatttgtgatacccttagaacagtgctcaataaatgatataaatgatgtgactaattgataaagacaaaagtcttgtgtttcccttagaaagatgatctaactatactgagactcaatttcctcatctgtaggattgggacagtaatttttcctttaatgttttgctttagtatttaatgagatacgtgacgtatttcatatgcaacaaaatgctattacaatgcaaagagttctggaatatcgaatatgttacaaaatttggggagaaattattagagtaatagagaatttttaacacctaggttggacatttaattcattgatagagttctaatttaaataagattaaaggtttaaaaatccttagttttgtctttaaattttgttatactatcttaaagtttgctaaaaaattgctgtgtctataagtttactagatcatcaccggcaggcaagaccaagattatcatctggatgagttctgtttgttagagatagtaaacacgtgatatctactcaacaccctttgagagaaactcacatttcctcttgataaatgaggtcagatattggtatcatatttaatgtcttcttcaaaagatcgcaatctaagatcactgaaggactttagaatccttgctggcttttgaataatagatttctaaacttaactttgccctgccaaatttatgtatttgttttaatggaatgtatttaagggttccatgtaccattgtgctatttttgcatgcccaggcatgctcggctgagaaggcaggtgaggactgaaatccagccctttgtaaaggcatccaagacacactcatgggattgtgtctgccctgaggaagtagagccttccttcacataaaggcagtgtccctgactaggctgtggccctggtagctgagtccaccctagaggacactttgcctctatttttcctaaacgcgttgctgatatccctcgacttacagtggggttatgttccaataaacccaccataatttgaaaatattataagtggaaaatgcatttaatatacctaatctaccaaacatcatagcttagactagcctaccttaatcatgctcagaacactgagattagcctatatttgggcaaaattatctaactcaaattctattttataataaagtgttgagtatcttttattcagtactgtacttaaagtgaaaaccagaatggttgtatggatacttgaagtgtggtttctactgaatgtgcactatttcataccattgcaaagtcaaaaaattgtaagtggaaccattgtaaatcggggattgtcattatatactttagaggtaggcctgaatgtgatatagataaaaaattgattgtatttttaaattgtatttaaaaattgaggtatgcaattcctcaaggatctagaaccagaaataccatttgacccagcaatcccattactgggtgtatactcaaaggattataaatcattctactataaagacacatgtacacgtatgtttattgcagcactattcccaagagcaaagacttagaaccaacccaaatgcccatcagtgatagactggataaagaaaatgtggcacatatacaccatggaatactacacagacattaaaaaagatgtgttcgtgtcctttgcaggaaaatggatgaagctggaaaccatcattctcatcagactaacacaggaacaggaaaacaaacaccgcatgttctcactcataagtgggagttgaacaatgagaacacatggacacagggaggagaacatcacacactggggcctgttggtgggtgaggggctatgggagggatagcattaggagaaatacctaatgtagatgatgagttgatgggtgcagcaagccaccatggcatgtgtatacctatgtaacaaacctgcatgttctgcacatgtatcccagaatttaaagtataataaaaaaaaaattgaggtctgcaacaggcaaagccactaaagaaactcagatatttttcattgtaatgttgaaaaagttatgaaatttcactaagcccgtgtctatgaagtgggaaaataacagtgatatgaatattatatgagaacatatttgtaaaatatttgttgtatgatagatacctagttttgaatgttagctatcatttttggctcttataataggttattggaaggtaggtgtgactcctatcttttaagcatgcagaatactgaagtgataaatttcatcattaattttcagacctttgacacttacttcggtgtttaaaaatattgatgtatgcagacagtttatctcctaaatatgagggaatgttatcatgatcactcaaaggatataccataactcatctgacatttaaaatgtcagtttgattgataaatgagagtcctgggtagatgaatgtgatttaaatggggtttggtttgcatacagaccaaataaataatgattcagttctgaagactggctagactagggctagggcaattaattggggtgctgggacatgatatctgagcaacagatgctaggttatgctgctttggtcaccaacaggcctgctccataacaggcaataggtacatagacctgacatttaagagcagttaatgtaggcctcaagaccttgaatggtaattaactaacatgaagaaatggaacagagtgtcaggattatctattatggcacaatttcctattctgagcatgcccagtggtgggtcagaggggaggtcaaggaacagatgggatcaggaagtaaagagagctctttccagctaggacaggcctgaggggaccgaatagacaatgcaaggcagagaatgagtcacaaggaacaaagaacctggcgaaaaccagagccacactaggtttctgatgaagctggccaccatgggcttctctcatttaagacactctctcaatccctcacgttcttcaggttggcatatgactgaacttaaaggctggagagctgcagcctacatgaggctagcaaataattaatgcattacagagcacttaaaatatgatacagaaatatacaattctgcatgtaaatccaagtattatgaaggaccaacacagaaatatataggcaataatattatgtgaggccataagataatgactttttattataataattatgcctgatctaaatgagctatgtttgatttctgtgtactttcatagctttatagccaagcatgacttctctgcccagaaaatcctgcctgatttactctttagcttctctctaatttactttctttttttgagatggagtttcactcttgtctcccaggctggagtgcaatggtgcgatctcagctcactgcaacctccacctcctgggtttaagcgattctcccgcctcagcctccagggtagctgggattacaggagtgtgccaccatgcctggctaatttttgtatttttagtagagatggggttttgccatgttaccctggctgtggtctccaaccctgacctcaggtgatccacccacctcagcctcccaaagtgctgggattacaggcgtgagccaccgctcctggccctactttacttttaccagctagggactgtttctcattcaatacatatatttgtttgtctgctaagttggatgtagtagttgagtagtggagttgaaaactgagagattgacagcagtcagttcattgaggattgtgttatcacgtgcactgggttagatagtgcaccctcaaaattcatgtcttttctggaacttcaaaaatgtggtttttgtttgcaaatggggtctttgcagatgtaattagttaagatgatgtcatattggagtggggtgggcctttaatctaacatggctgatgtccttataagaagaagagaagaaatacagagaagacacacagggagaatcccatatgacagaggctatcccgagtgacgtgtctataagccaaagaatggcaaggattgctggcaataccagaagctaagaaagaggcacggaacagactctctcctagagtattcagtgagagcatggccctgctaatactttgattttgaacttctagccaccagaactgggagacaatatgtttctcctaaaaaacaaacaaacaactacaaaccctacccagtttgtagtactttttaacagcagccgcaggaaactaatacatcatggaaatgaatttaaacatcttattatctataaagaatgtgaactgtcaaagcttactgttccattggacatcagtttcgtgtatcttttatcgtataatgcatgactagagtaataatttcaaaggacattaaaaaatacagacattttcttgaaggtacccaaacgtttgaattgtgggtcaggccaatatcagcaagggcatttgatagagtttctcacaataaccttctgtgcatgtaaataactgtatcttctcaatagatttgttattgtatatttggtcttgtagacttacccgaggaagtcagataatagcgtatttcgatatactgtgagaaaaataggtacacactaaataggagtatgaaaatacacaaagaattacccatcagcaagagcacattatatttgtttttcttgaaacacccattctttcctccttctactttgttttatttttaatctggctctcttgcttatcttcaaagttttatctcccccaataaatcttcctgccatggtgaaggttaaatgtaactcttccatcatccacgctagcacataccatatgcatagaagttataaagtccttgaagacagagactctattttacacatctttgaattcaaagccctaaaatatttgagccctgaagaagttgttaggacattttagccaccagtgcatactctagtagtgacggtagtgatgtaagtacattcctcagcttttctgaacattagtgaagaattccttttaataaagagcaagattttccattgatactcagatggacaagttttggagtattctcagagatgaaaaaggattatttttcatttgatgtacatgtattctgtgattttgtgaacacaatggatgcttgctcttttcattattattgttattcctttgggtaaggcctttatgttgtcaaaaacttctatttaaaaaaagtgaaaataataaaacattcagccatttgcagtcaattattcttgccactggttagtatatttatttaccagggttcttaattaatgttactgagaggctcaaagatctgaaaaacagcattggttccaagtggctgcatttctttcttattcatttatttattttttagaaatgaggtcttgctctgtcacttgggctgaagcgtggtggcgcgatctgctcactgaagcctcaaactcctgggctaaagtgatcctcctgtttcagcccatgcctggttaatttttttttttttctttgtagagatggcatctccctgtgttgcccaggctggtctcaaactctgggcctcaagtgatcttcccaccttggccttccaaaatgctaggagtacagatacgagccaccatgcccggctagctggctgcatttctttaaggcccagagcctcctgtggtagcatctggatttgaaatgctggctgggtgcagtggttcaaacctgcaatcccagcactttgggaggccaaagcaggtggatcacctgaggtcaggggttcaagaccagcctggccaacatggtgaaaccccatctctattaaaaatacaaaaattagctgggtgtggtggcgggcacctgtagttccagctactcaggaggccaaggcaggagaatcgcttgaatctgggaggcggaggttgcagtgagctgagattgagccactgcactccagcctgggtgacagagcaagactctgtctaaaaaaaaaaaaaaagagaaaggctcataaacattgtctatgtctaagctgcaacaatgattgatattgtgaagattattaatagtgtgggtcaactgaaggggaaggaaaacaccaaaggagaatttttccctcccaaatcataaaggcattcatttttcagagaagaagagaggaatattactttcattaaaagaataggaaaattaaaattgttgttattagccacaaatcagggtagagctgtgtgaatccatggggagaatgtaagattataagcagaaatcaaggttagttttgtcttgtacttctggaataagaaagatgatatgtaatcagaccatgtctctgataattttgttaaattagatgaagaaaatcacatggataagaaaatgtaattaaatcactaaaaataagaatgtcattgttttcactttcttttgctaagtaggaggtgaggaaaataaccttttactctgtacatgagtaattccaatatcctcttagaaatgacaattggattgtaaaatgggcttgcctttgaccatattctgaaaggataatataatgagttggcaaaagaccccatgaatagagtttatgtagaaagcaacaaaaaaacacaaatataaagaaatgcctacaaccaaaggtcagtataattgatagcaagatttcaaggggaaaaattagggtcagggaagatataaaatttctgtctccttgttttggtgatttttaatctagaaataaaacaggaatagtgaaatattccatagtatatctaaatatccatctttgtggcagggagctagaaagattcaggattattatttataaaccaatttagactaaattcaaagactgaggagatacacctaatttagaagaaacaggagctctgagacctgactttgcatattactactaatttttttcttagtgctcgttttgctgcccaggctggagtgcaatggtgcagtctctgctcactgcaacttccgcctcctgggctcaagcaattctcctgcctcagcctcctaagtagctgggattacaggcgcccaccaccacgcctggctaatttttgtatttttagtagagacagggtttcactgtgttgatcaggctggtctccatctcctgacctcaaatgatctgcctgcctcggcctcccaaagtgctgggattacaggcatgagccaccgtgcctggccagggcctttttaagtattattttttcttctaaagttactgatgctcaaatgaaacctaattttgaaaaatagaatgtttgaaagaaatagattgaatgaaaataacacagctgatatttttagcaagattcttggatatagctttagaaataaactagccagaaggagcagtatggcaagattaccttttctttatatcaattagacatattgtatcgtatgacttatttagtactgaagatgtctgtgcctttctgcagttgtttttcatctattaaaagagaaagatactatctatgctatcttttcaagatccctgtggatttgaattttcaagtgtatagataaaccttgattgatgaaaaattgatggacaaaattaattttataacaaaggtaaagaagtgagtattgccttcataatgtgccccacagcttttaacagaatttctttaaacaatatttaatgtatttttaaacaattatatatttcaatattaaatcttaagtatgtttcaggaatatcttctttaagataattgatatatcccagttttcatacgttttaaattttttacgtctacagtattatattttcttttgaaaaattgcgtaacattaaggtagtaaataaaaacaaaaatagtttaatgtctcttgtgggaaatacagttttgttttgttttgtttgtttgtttgttttgagaccgagtttcactcttgttgcccaggctggagtgcaatggcacgatctcggctctccgcaacctccacctcctgggttcaagtgattctcctgcctcagcctcccaagtagctgggattataggcaatgcactaccatgcccggctaactttgtatttttaatagaaacggggtttctccatgttggtcaggctggtcttaaactcccaaccttaggtgatccgcctgcctcggcctcccaaagttctgggattacaggcgtgagccaacgccccctgcctagttgtttttgaccacatattttttctctgaaatataaatgatttgtagcccaaaagtttaagtctgaatcaattgtctgtagtaaatgctgcaccatctacatttgttaatgagaacaatacagaactaacttgaaaactgctcaaattttcccttgcataatgctcagtttttaaaatgtattgccttctgtcttctcaatgggattgctgctttttaaattttcattaattcctaaaccatattccattgtattttttttgtacatttgctttaagtgactgtctattggaggaaaagaaagtgtaggttttctggtgaattataatagcaatatgattcctggaatgaagcagcttttctcgtttggaatgaccataaaatggcaatacacttaacagtaatacccttgtctgtgttacagcaatgggtcttaatggttttccatacgtgaacttagccgcttgcctacagagaattactaagtaactagtatattccacatgtaaaaatctccagagggcttccacacactttaatacacgctgatatacaatataaatgcaacgtatcctgaagaaaaaaaaaaatcacaaactccgtgtgtggctctcaacaagctactattttctcattagaaaaataggaaagctggccaggtacagtggctcacacttgtaatcccagcattttgggaggccaaggcaggcagattacctcaggtgaagggttcaagaccagcctggccaacaaggtgaaaccccttctctactaaaaatacaaaaaaaaattagccagtcttggtggtgggtccctgtaatcccagctacctgggaggctgaggcaggagaatcacttgaacctgggaggcagaggttgcagtgagccaagattgggccactgcactccatcctgggcgacagagggagactctatctaataataataataataataataataatagtaaagctaataactatacaatatcttacctaaatgtttaagaacacctactaataatacttaaaaataccaaaatataaaaacaaaacatacaaatgtaaagaacatacagtcagtagtacagcaaatctatttgattacttttttcaaaattctattttaatttttttgctaattttaaagcactgttattaaaagaaaatattttcaattggttttattctcattgtatcttctagaaatactagttcattttaggaaaataaaaatagtgagagaaaacttttagctctgaatatggaccatgtcccatgcctgccactttgttctagtttttgttatttaattatcacacactataaaggagttcttaccaattcttttttttcttcagaaataattgattcttcagttttttaaactgctttattgaggtatgattggcatatacaccaattctcttttataggcaatgaaattggagatcagaaaaaattgagtaacttacctaagactacaagtaagtggcagagctagaatttgaccccagacaggcttcacatacaagttcacagggccatcagctgcctgaaggcagagaccatgatttgtatccatagtatttatgtatctctcatatctaaataaaatctagtcactattcagatttaattgatattttcaattacctttgtatttttaaaagaagacacattatagaaatttgatactaaatgtaagtattcagttctttagttaaattgaagaaaagcagaaataatattctgtattaatacattagtgaaaagtcagcagctaaaatgtaagagatgtttggtgacacaagtaaaaatggattgtatactttttgccttatactacctgactctggcatttagatataacttgttccagagacctgtcataacttatatgtttcagacaagaaaagctttgggttacctgaaatagtgtagttaaaaatcaaacgctgtactcatctagagggactttgtttatccattcaaaaatacatgaacagggctttatcttggcctatttgaactccatgccagagggcagcataacatagcaaagcatgctgacctctccttatcactgcccttgttgaaaaccttgagttcttcttaatagtctggtatatagttttaaaatgttgatattttgttcacagctatatgtgatctcctaaacctttgcttcaaaatagtctatttctctgttgtggtttgcttcagggtaaaagccctctgatttcccacaatcaggacagtaatttggtaggttaataagttatgttgtgtgttagtgaaatataagtgctaaggaaaataaaagtagtagggcaagggaaatcaggaatactagggcctggaaaagagcatgaaataatgtgttatgatgagttgcactgagcaggttaaatcagaacgagacaagaagccaactagatagagaagattgttccaggttaagggaatgagtggaaaaaaggctctcaggtgagagtgtgttcaaggaatagcaattaagactgtgactactggccaggcgcagtggctcccacctgtaatcccagcatttttgggaggccgaggcgggcggatcacttgaggtcaggagttcgagaccaacctggccagtatggcgaaaccccaactctactaaacatacaaagattagccgggcgtggtggtgcacatctgtaatcccagctactcaggaggctgaggcaggagaatcccttgaaactgaaggcagaggttgcagtgagccgagatcacgccactgcactccagcctgggcaacagagtgagactccctctcaaaaaaaaaaaaaaaaaaaagactgacttttataaggaagaaagtagtaagagatcataaaatcaagaggatttggtggtacagattagagacttgtacgttttcgtttctgtgcagtagagaaagaacacagagacatttgcaaaacaatttaagaggggattccttcaatacttttctaatatccctctcccaaaggcctgtttattcttcagctaatttttactgataatttgtattttttagaaagaacgcatctctttattttatagtcatgtatcatcaaattatgtagtatataattatattagatcattacatgagcaggaatgggaacaatcacagttgattcttgctatgttccggttatctattgctgagtaacaatttattataaaacttaatagcttaaaacaccagtcactttttatagctcatgattttgtgggtcataaatttgagcgtgggtcaactgggtgattttccactctatgtggtatcaacttgatccctaaatgatactcagctggcagatgagctggtcagcagaatccaagacagctgtactcatatgtatgttgctttggtggagacgacagggagacttgggtcaactagatctattgactctagtacctacatgtggcctcttcagcatggtagacccaggattgttgaacttatcacatgggagctcagggttctagagtgaatgatacaaaagacggaaaatataagtttctggtatcttcaggcctaaccctggaaactagaacagcagctctttcactgcaggggtccccaacccctgggccacacaccggtacccatctgtggcctgtgaggaacccagctgcacagcaggaggcgagcggtgagccagtgaagcttcatctgtatttacagccacttcccattgctggcattactgcctgaaccctgcctcctgtcagatcagcaatggctttagagtctcaggagcacaaccctattgtgaactgcacatgtgagagatctaggtcgcatactctttatgaggagtatcaggcaatctagtgactgatgatgtgtcactgtctcccgtcatgcccagatgggaccgtctagttgcaggaaagaaagctcagggctcccactgattctatgatatggtgagttacataattattttattatataatacaatgtaataataataatagaaataaagtgcatgataaatgaaatagtctccaattatcttaacactatccctcacctcccccccactaaccccagtctgtgggaaaattgtcatccatcaaaccccagtctctggtgccaaaaaggctggggaccactattctactgcattctattagagcagccacagaacccacccaaattcaagggaggaaacaaagactttacctccccagtgaagaaatgtcaaaaaaattcgcagctatctttaatccgccaaagcatacgatttatctctcatagagagatttctagttaaggtttttcagcaggtcatcttgatccatagtaaatctaacaaagggaatggagagctttggttaatctaatgattcagttaaatggagatccattaaaatagattctactataattccattcattatttttcacattttttctaattttttattattcatagtgtttttgtccaatgacctttaaaatcatgaacatttaatatataggaatggcatccatctgaatatggcataattataaatgaatttactttaatatctagaaaacattcttgttcgttctctaacttttagataaaagccatcccttcttttatttaatttaactctactttaaggctttaaaaacctgactgatagggaaaaagtccaaaactgggacgctcgtgtagactatttactgcaataaatcattgtgaaaaatatgggcagtcaagtgctggatattctatttctgtttgaaccctaagaaatatcaaccgtcttctcactggcttttagcacatctgctccatttaaaactatggcagggaggtgtgtaagattgaattgattgtctcttggagtttactgtgcttctttcgaaactttgtttttcagtaaaggcaattgcttcttgagcagtactggttattccacacccactaattatcatgcagccatttagagttgaaatggtaatcaaaccaatgaaagcccaagattagcagcgttccttcttcatttctggtagagagattcatctgaatatctataaaggattttgtggtgcattctctggcagatgcagtaaaacaagtgcaacatgaactttaaaatacagctttgagttttaggttgaattttaagttgaacatatttcaaattttgcaatttaattataggagttaaatgatcttaaaggatcattctaggtctgaatagaattttaagagctagattttattaaagaaaagatatattttaagtgataaaatttatatattttgcccttcagaaattactggttgatgtttctattaaaattattaagatctaaatatacaatgatactcgagaccaattctcatttaaggaatggcatactgtatgacaggatgtgaggtgttaagagataattacatgcctagaaggtgtagtgaatcatatgaccaaaagccaagaacatccagagaccaaaattcacagtcatttcaaatatcattactccctggtgtgtgttattctacttagaaaattgcatgtttgttgtttgtaaatttagagacaaaaaatgcttaaattaattttttcatcatttctaaaaatttgctttaatatttactagcccagtaaaatgtattcaaatcataattataaatatcagggctattgagcaggggaatgtgtcaactgccattccggaccttcttctggaactaattttgattgccagcagaataaaatgcatgcaatgaatacaatgaatgtaatgctaaatcaaataatcaagtgtttatgtttatgtattttgatccccctatacatttaaaataactctgttttattagaagttctgtatttgagataaaatgcacctccctctcatttttcctggtttgtatgtgagaccacagtatttcacagtagatatccagggaaataacagacaaaagaaaggagagcaggaagaatattttaagatttattggccagcggcggtggttcacgcctgtaatcccagcactttgggaggctgaggcgggtggatcacaaggtcaggatgtcgagaccatcctggctgacacggtgaaaccccgtctctactaaaaaataaaaaaattagccaggtgtagtagcacacacctgtagtcccagctactcgggaggctgaggcaggagaatcgcttgaacctgggaggcggaggttgcagtgagcagagattgagccactgcactgcagcctgggtgacagagcaagactcgtctcaaaaagaaaaaaaaaagatttattaatttgtcttcaacaaaatactaactctgcagtgccctcaccttgattccttacttattgaggactaagcctatttttgtggattgaaatgatgttaattatctgcatccaaatacccctcataggggcgactgtgagcacgtccctctactagtaacacaatactcaggtgagagctggcaaacacaggaagactgaaaagcccgacttggaatcctgacttctacattttttaactgtgtagttctgggagtttcttaaactcgtgtgcctcagtttttccatttgcatctgtagaaagattgtaatagaaactaccttctctgttataatgattatatgagctaaagcatgaagaaatataaagcagctaaccctgagttagctctcaagaagtattttattattaacttgttaataccttcaacttataaaaatttaaaaattatgaaattttttaaattatgagatttacataaagttttcagaatagtctaatcaatacagacagaaagtagattagtagggcctggggacgtggagaaaggagagtgattcctaatgagtatggggtttcttttttgggctgacgaaaatgttttatattagaaagtggtaacagttggccaggcgcagtggctcacacctgtaatcccagcactttgggaggccaaggcaggtggatcacgaggttaggagatcaagaccatcctggccaatatggtgaaatcccgtctctactgaaaatatatatttaaaaaaaatgagctgggtgtggtagtgcgcacctgtagtcctagctgctcgggagactgaggcaggagaattgcttgaacccaggaggtggaggttgcagtgagccaagatcgcgccgctgcactccagcctggcgacagagcgagactctgtctcaaaaaaataaataaataaaggaaaaaagaaagtggtgacagttgcataactatgtgaatatactatatatcactgaattgtgcactttaaaagagtgaattttgtggtgtgtgagttatagctcaataaaatgattttaaaaaataaaatgagaaggatgagagaccggtatatttcagaatagtgcacttaaaaaatttgtttacagaacactaattgttcagcatactttctactggacattactgtatatatatatatatttagtattatataaatacattatatgataaccatatctgataaatattatcttactttatagatgatgaaactcagatcttcaatgatggaagtgacttatctattgttgagttgtaattggatcttatatatatttccctgctcccacagagcctacatttctgaaaaagaaattatgtctcttgtgataaataaacaagaaacatatcagataaaagtgttgcattgagaacaaactgagttgagatagtgagtgattgggtagttattccagcttcagtagtaaagagaatctttgctgaagaggcatgtcagctgagatatgactgtctagaggaaccagtcatgtaaaaactgaggaagaaccttccagaaggaaagaatagccagtgctaagacactgaatttcttatattttgtgtttagaaatgctagggttatagttagcaagatagcctggaaggagccttcccatgttttctcatatatgaaataactaacatggaggattattgtgaagttacaaaaatacatgaataacacctagtatagtatctcactcgtggttggtatataaaaaatattgctgttctattaattcctcaatatatagctattctatacaggtcttatgcaaaaaagaaccttagtgaacgtatttcaacttggtaagagttagttacacatgggctgacacaatcataagcatggaaaatagacaatagattgaaagcattaacaatggtagttggaacttcagaaaaacccactctttcttaatctatgatgaaggaaatggtgggttttccagtggtattgaaataaaaggaaactttttagatggtggagtaaggtatgcaaaggtagcgagcgtgtgcatctatggctggagagaaatccaaagacaagatagaatcacccttttgctctctgtgaaaactctgattttcctttcatggactaaggtctacactctccaatcatcttagttgcatacactattaattcatcaatcaagctacgtcatcctttgtgatatgttttgtttttctttcttctttttaattattgtgggtacgtaagagttgtacatatttatgaaatacatgtgatattttgatacaggcatacaatctgtaataatcaaatcaggataattggaatattcattacctcaaacatttatcatttatttgtgttgggaacattccaagtctactcctccagttaatttgaaataaacaattaattattgttaactataatcaccctattgtggtacagaacactagattttattcctactagctaactgtatttttatactcattaaacaagcccctcttcatcaccccctccccactacccttcccagcctctggtaacaatcattccactttctacctccatgagatcaattttttagctcccacatacgcgtgagaacatgcaatatttgtctttctaggttgtgttttgattagacaacctcttatttctaaaatttgcttaaattatttgagtacttgatccttcacattactgccaataaagcaaaccacagttgaaacttgatttttttctaatattttgaatgtatgctgtgtgcaaaggtaacaaagaggaatccatttaacagaaaacagattgctaatatcttcatcatttactttagattccagtctttggatatcagatttttctctggtcttcatatttatttgttttggcatcagattgcattttcttgcttggtttaaaaaaaactgtatttttttccctgtattatcggtgttgatttcctctgttcttattcttcaaattatgcagagaaatgtgtacaaagttaggaggagttaacgctatataaaataaactatctattaatatcattcggttaattttcaaagaggctgtaaatagatcatggatataggcaaataccagatgccacataaaaggaaaacctcaaagacattttttcttttattaaaaccatcaacagtaagaactgtgacagtaggttttgggtttttttattgccaaggttattatcagccctctaccctaaataagggaataaaatgatttctagtttttggacactgtgttatattattctgtaactacaggaacataatataatgctacagtcaaaagaataagcttagaaatcatctaagtttaaatttgtcactcattttctagaaggatgaccttatactatctatttaacctttctaagactcaattgccttataaataaaatgattataataaagacttcataagttgccatgagaaaagtattaagcacagtttctgagataaccaatattgataataatataataatcatcacaaaacattacctttctccttgtaaaaattataacgttaatggttttaaaaatgtaattctagtaccaaagtgaagtttgtattatgttctagttaatatatataaaaatttaaagaaaaactaaaatacatatagctgtgaaaatactcactaaaccaacatagaaaagcatttgttttgctctgtaaatctaaccttgatgattatgataataaaaataatcactgttaggttattttacttgtgattaacttctatttatgtaccctccctctattgatgtttaacaatagttcatagctatgactatttcatttcatatggctgttcctaaaatcatactgaacatctgactccatattcttaagacaacttgggacctctatctcttccctgcaacaatatttgtgagttgacaaacataaaagcctatgctttagcacgcacaagagatgtggaaaggtaccatttaaattagtaccataaattttcctttttatgtttcctaacctcatatttattgaaatgcattaaattaactcagacatctaaggatataacatttaatttacaataatctttatggttacttaattccattaaccttatctttgaaaggcgtcaaattaagaaatacagagcctgtcactttcatttattcgggggaggctgtgaactattcagatgatgtatctttgattgagggaaggaggtgcccaagaattagtcaattacgcaattaaaaaccccaaacctttcctttggtatgtttcacacaaaatctccattgctgtgctagattacactggatgatgaatcactacttgaatcacttcagttttgattattcaaagtaaaaattgaatggttggcattttcaccaatttaaaagcctcgccgggcacagcggctcacgcctgtaatcccagtactttgggaggccaaggcgggtggatcacctgaggtcaggagttccagaccagcctgatcaacatggtgaaaccctttctctactaaaaacgcaaaattagccgagcatggtggcacatgcctgtaatcccagctacttgggaggctgagacaggagaactgcttgaagctgggaggcggaggttgcagtgagcggagattgtgccattgcactccagcctgggcaacaagagtgaaactccatctcaaaaaataaaataaaataaaagccttaactttcattttctcaccagattttagcttgacaaaagctatctttaagggttgcttaggcatttcagtttgaaatgtttatgttcttgctataaaatgtgtggacatgtgtgtccaaatatatacacacaagaaattttaggtactgtcatagtgttgggatcattaagaattgtgttttcatggcgagtaaattaatttcctctgctgtgagtcactttttggtagtgtatgcatggtttaaatgaaactcactgaactgtttttgtggattcactgcttggttgttttactaccctagagagcaattaggtgtatgtggagtgtgttgaacctataaaattttacttgtgtgatgactgcaaagaaaatgaaagtagtgtcatgcaatccatgaaaactctgctgagtttctagctagtctcttaataaagtttacacaattcaaactctccaatcatactgaatatcactgaggctcttaagacttgtgaaaatcagatattttaaatttttaaattgtcatattatgtcgccaatttccatttctactctatatttatagtacttttttgcattttgagtgcacaagtcaacccgtttggccatacatagcaagacatgtattggtgagagcagcaaaaaatatgtaactgctcgtttacaacttttgaccagtagcgaggtcacactgagagtaccgctcaggagaattgagtcaagttttaggctactaaaatttgctgagctctgtgacctagggacatattcctgactccagcaggcctttgaagaaatcacgctggcaacctcacaatagatgaacaagaaaatggatgaacacaaccatattataagaagcagttatcagacgcatgggttctggagccaggctgtttgctgagttcgaatctcagtgctgctatttaatgactgtgaccttaggcaagttgcttaactctgcctctcttaattttggaaattaggaaaagaactacttacattttaggtttgttggaaagatttatatcacttaaaatgtatacagcatgtaacaattattgaattatacttaacaattattatctaggggaaaatatactgatgattttgtatattgtatatatatacacacacgtatatatcagtaactttaaatggggaagtcactaaaaaaatcataacttggtgtaaatatacttaatctgtatgccacggctagttttttgtttgtttatttttgccaagtttctttaatttctgttggccttttggggtcaccccattagcatctgcaggatagcttacttatacaggggaaagtgtctgttaccagtacagtacagtggtggtataaggaaaatctattaaatgaagtcctgggtgtttatccctataattgcataaatgtatgtttctcaggagtagtgttgtgtaagtaaatggataaaagtcatagagtgctaaagctaaatggaaacaaagttatttagtccaattcccatattttatagatgagaaaactgagaatcagaaaatggagggatttgttcaaggtcatagtagttattgtctgagatgaggaaaatatccaaatgtctgcttaaatactgagatatgcttaagttagcgttgaaaatattccatttaaaatagcaatattttcttcctcctgaacatctttgtactatttagaaaaacctagaaagcatgctggaaaactatccctttttcccttgtcaacctccaattaacacaaaagcccaaactgtacactgtcccttataaaaacaacctaaaattttgagaataacattcataatcttaaaagaaaattacctacttactacatatgctggcaatgtacttgctgggcaatcccacttgaaattcatagaaattaaacagcatttcagaacatcattccaacacctaattaatgacagggagtgactgctgactaaagaatgtgtccatgatactttcaatttatagcaaaaactcttaactattgatagcagaaatgtgatatataaggatcttgttctgtcctttcaaaagtcaaacagaaccactgtcccttaaagctgatcggcaaaggaagaagctgggagtccaaaggatttatttatacaaaatatgtatttccctaatgttcactttccaactttgattagacattttttttttttttttttttttttttttagcgatggggctgtattagtcaattctcacactgccataaagaaatacgcaagatgaggtaatttttaaagaaaagagtaattggctcaaagttccataggctgtacaggaagcataatgctggcatcttctcggcttctgggaaagcctcaggaagctcaaaatcatggtggaaatgaagggggagcaagcatgtcatgtggccagggcaggaacatgagagagagagtgggaggtgtcaaacacttttaagcaaccgtatctcatgagaatacactcaccatctgaagacagcaccaatgggatgatgataaaccactcgtgagaaatccacccgcatgctccgatcacctcccaccaggccccaccttcaacactgggaataacttaaccgggcgtgatggcaggtgcctgtaatctcagctacttgggagacagacgttgcagtgagctgagatcgttccactgcactccagcctgggtgacaagagtgaaattccgtctcaaaaacaaacaaacaaacattggggattacatttcaatatgagattatggcagggacaaatattcaaactatatcaggggtctcgctctgtctcccaggcttcagtggcaccatcgtaactcactgcagcctggaactcctgtattccggcgatcctcccacctcagcttccccagtagctaggactacagttgcgccaccacatctggctcatttttgtagaaatggggtctccttatgttgcctgctttggtctcaaactcctggccttaagtgatccgcccatctcggcctctcggagtgctgggattacagacgtgagtcactttgccctcccggactggttttatgtgtgaaggaggctgctgctgatttcatgagtaagctggagaaacacattaaggaatgatactgtccccttagttgtcaaccttcaaaataggaaacaaataatagcaaagaggtaaacgtggcagaaagcaggggtgagaaagggaacaatcagatatgcgaaacatcaaagaacaagaaatagcaacaaacccacgccagaagccagcaagaaaaggagaactgttataagtaccagtaaaaatgctgaagaatggcaataaaaaggagaaaaaagtactcacaagggaggccttgaaatgacaataatctattccaggatgaaaagaaaaggaaacactactccaaggcaaaaagaaaataaaaagtaaggaaaatcaagatagatgaatatcttcaaaaaatcagcacaatggagatagagtgtttagggaataagaaaaaaaataaaagtagacagatacagaaagaagtagcaaatgcaaggagcaatatccctattattaatgctggcaaattgtacttatatctctttccagctatatagcatgttcctgggaaatagcctaaagcactgagaattagggataggagaatgctgttactgtgagaatacgaattaagtaatgccagagaaaggctttgctgccaatataatagctgagtgatcaggccacgtcatttctgtctgatgtttcttcctgtcgaataggtaatagtattatttctctaactcaagggacattaaaaaaatattcagttaatgtatatataaatggagacaatatagacagatgtttaagaatattttggttaaaaggacagactcaaagccaaactttctgggttggaaatccaactctttcattttctctcagtactgtactgtaggactctctttttatacactttttttgtactgtcttttttatacactgactctcttttttccttagtttcttcatctgaaaaatagagttaataatagcacctacctcataggattgctgagatgagaaaattaacaaataaaaatcacttagaccagtacctatcacatagcaaggaaaatctcaactatattcattgtggtgatgttttgttaataaacttttaatatgaatgtaacatatcacattcattaatatataggaattatatttacttacattgataaaagtcctatctgacatcatcttctgttccttcattatttttcccttcttcctcactttttcagttctgtctctcttggttcattccaaaaaagggtcatttcttttttgcctcaactgcagaatgcatattatttatcaagcaattattgagcacttaccatatacaggcactgttagaaagacatctaaggcacaattttttagtgtgctgaaatagttattcattcagcaaaagaaggagctcataaaaataaaaaagaaatgctatgggtaaatataagaacatggtgatttcacttggtcctcttggatgtaaaaggaagctttaccaaaaatgttaaaataataattgatggttgcagtgctgctgaattacatcaaactttctattgtctcacatttcactttctaatttgtccgttcctagtgaaactagaagctgaaaccacatttttactcatttctcccgttatcctccccccaccactataaaaagagaacatttatgcttaagtgcttctgatgatgtgttctcagtatctcattctgttagactaatagtcctcatgccaagttaaagtggttggaaatcctagcacaccttgcctaagtgtgttttatttatcttgctacaccccgttttattgtaatagtcttgggagagccccgaaagatggcattgacctatttctataaactttaagggagcaggggacgatctccctccataacaaattccaataaatgatgaggttaaaaattatagaaaggatatttctagagaggtatttttatgtgataaattttaatatatatgtatatagtttttaaacttgaatatataaaatatatactaaacttgtatatttatatatgtattaaacttgtaccacttaaaaattcttctgtagaaatatcttttctataatttttaacctcatcatatataatgatggtaattcttcgtacttcttactcctaattgtcttagttcaattgggctgctataataaaaatatcatagactgtgtaatttataaacaacgaagatttattgctgcagaactgtttctgcagcccaggaaatccaagatcaaaatgttggcagatttggtgtctggtgagggttctgtctgcttcacagatggtgccttcttcctttaccctcacatactggaagggcaaacaagttcccttggcctcttttataagggcactaatcccattcatgagggctccgcttatatgacctaatcaccttcttaaaaccctacctcttaatactgtggcattggggattatgtttctacatatgaattttggagggacacaaatattcaacccatagcactaatgaaatacagcatttttagagagcaatgtctactattttacaggcagcttgctactcgtgatgacaatacttcttcgatctagtatcccagcattgttccattaacaatgtatgcatcttaccaatgtaatgttcagtaaatattttgcatattttaagaggaatctgttgtggttttttttttttttttttttttttttttgagacggggtctcactctgccacccaggctgaagtgcattggcttaatcacagctcactgcagccttgccctcccagaccacaggtgcgtgccaccacgcctggctgatttaaaaaagaaattatttgtagagacaaggtctcactacgttgctcaggctggtcttgaacttctgggctcaaccacccctctggccttggccttccaaagtgctgggattacaggcatgagccaccaaacccagcctgattttttataatacaaaataatatacactcactgccaaaagtagaatacagaaaaacacaataaaggtaatagttgcctataattttgctattcaggaataaccagtgttacctgtttggcacagacattcctattgagaactatataatgatagctaatatttactagcacttggtacatacccatgtttcaattaccttatatgttaaatattatccatttatgcctgaaaataattttataatataagtactgttattagaccattttaaaaatgtgaaaattggtgcaataacaagatgcattaacttgttcagggtcacaatgccattataaaatggagccggaattctaaaccaggcattcaggctccagagcctaggtttttaaccactaagaataatacattttagtattttagcatacacatagttttggaagctgcttaattcacttaatatatcatatggttttccaacgtagttaaatattccataagaatgtgatttttttatgtctgcatataaatatattaataggatgtaccagaattgttttcatttctatttcatgaatatttagtttgcttctaatttttcacaatagaaatgatctagcatattttataaaatttttgagcagatgtacaagtatttagagactagtatttgtttaaataacacgtgttggacgttagtggggtatatatcaatgtgaaacatgaagtagatgtttgctttgtggtaactatgttccaggaacagtgctaggaagcactagggactggaaagctgtaaaaaagccagtctttctgttcttaaatatcttataatctaatggagagagaaacctgtagaatagtgcgtttcagtagaagcaagcttagtgtactgagaaatgaaaggcagatgatgaagtttggacaatggatggaaactatcttatcaagagttggggttataagaatgacagtaggtgatatgaagaaactagtgttttaagaagatatatgtggcagcattatagacatatggggatttagaacaggattatacctactgaactggacttattttatttctagaaattttgtgataataaataccatacattatatgttgttctcatataggagacgtaatatatgggtatgccattaatcaaaggctgattttaagtggaagaattcgttctgttggtttacagtcccagttataaattaatgggcttaccacgtagttgttcccagatcttggaagtattgaagttttttaaaaattaattaatttatttttaactgacaaataatagttgtacatatttaccgagtacaacgtgatgtttttgatctatgtgtatgttgtagaaagagtcagtcgagctgactaacatatctatcacctcaccaacttatcattttttgtagcgagaacattaaaaaatctattcttttagcaattttgaaacctataatacattatttttaactgtggtcactgtgaggtgttgaatgttttaggaaattctcagataatctcagggccaagtgttaagcagatcattctctgagactggatcttctgcagtatgtctgcgaacttttttatttcactctaagcctttgttgttgccttcaggggttactgactcacgtttaactcaaggctgactgagttagatatataccgcctatagttgatgggttttgttgccagaaatattcttttgcttatcagtggggaaggtttttgcttctactgctggatttaaaggtgtccctcaagattccattactcagttcattgagaaaagcttaaagctaacggaggggagttctgagctctgtttgatgaaggaggctgggtaaaataatagctcccaagttggctcaagttcttccagatgttcatgtttatgtaaaacttaacacttagagatattccatgttgtaagatgtctgtgcaaaagttccttatatcaaattctaaaatgatttttggtcatcaggtgcaaaaattaacactaatcatctaaaataaccaaccagatagattttcattctgtttgacttttgaaagcaaatacccctatgatattgagtgagtgttttattgtttgattttccttcaaacttgctgtaaccctatgggaaagatatgcaatcaaaataaaagaacagtatccaaaaataaatgggtcatgaagaattgtgcttaaaatcgttaagtaaacagacacacaccacagtgatgagattgtagaaactggaaaaaatgctgccagctgaagagctgcaaagagtttggcttttcatgaacttagttactgaaatgaaagttcctccctaggagagaagccaaaatcatagcacggtttgaataaaagtacacctttccaaagttactgcagaacaattatggccgggatcctttactcttattgagaaagctcggtaacctcttattttaaattgacttccattgagcaataatgcctccctgcttgcactgtaaggtactttattgggtaatgtgtttacaagctggtctcatttttctttttgtaataggagatgggtagcttactgctatttggaggtgactccaggaaacatgattttcaagatggtcattttaaaaaattgtgattattgggaataataactctagagacaagatttaatggacttacttccaatttattcagtatgtcaccaggttattgcagttctagttttaaatctgtacattcgaagtctacgttgttccctgatgtactgtatatttaggtttgtactactacatataggtgctaggtttagctccaactctcagcaggagcctaacctctcagaacaattattgtagccagatctttggtggccctactacttgctttttttttaaccactactatttctttaaaatcaaagatatggcaaacatattactaaaaggaagaaaacccatcttcaacaacattatggtgtttttcacttcaaaggcttattttgtatgcatcatttgatttaatttcctccaaagccttgggaaatgtgagtgattatcatcttattattgttgttgataaatagtagctactatttatttagcactaactctgtatctggaactgtggtaaacaccttgtagtggaaactaacaatagcctcaggaggctggaattgatattatccccattttacagacaacgaaatgtgatataaataacataacgtgccaagattatgcagctagtacataggagaactggaattcaagccctagttaaattgctttgacttcggagcctgagtgttgattgtctatggcatgttgccaagctattttatagctggaaagcctggtgatgctaaaagtttaaataccttgccctaggtcataaaattagttcccaatgccttccaactgaaatcccaaacattttttattacactttgttgtccgcaggactgctacccgcttatatggtactctttgaaaattaaacaaagaggcatcctccccacttcccaaatccacagaatagccaattttgaaagaaagcacgcttttttttcagtatgactctgctttattggaggatcacagggatggctggggggaatgtgggtatgatactcaagcacctttgtgcaaggtgcaatgcccagagccataaggagtggccccagttgtgctcatttaaaggaatagttggacaattctagataatattaagggagatatccaaaagagtttcctataagtatgtgctcttaagagctgtaaggaagtaaaattttgaccccattagttacatttctaacatgatctaacatcttcccttcactgccaacgaaaatgtttaagaagatataatctgacagcagttatgctaaaactcccctgaagccaaaatgtgtcacttctcaaaatgaccctcatcttcacaagcccttgaagaggagttgaggattatttatgaactaggttttaacctaaggtgatacattgtgctgcagttgttactgagcttagggatcattttgtctattcatttcaggttaccattaggttctttttcaaaatcaattccttttaattatacagctaccctgggcatatattaaatgtcttacaacattgatacgctttcccctgaagtactgacaaagtaatagatttaatgcgcaaccacaggcataaaaacccacacacagtgtaagcatacaatgagtacactgatactcacaaaagaggtttaaaaaaatgtctgtaactggggatgtggtggtgtgagggccccatgaatttttagcttggaggatatcttatcgtaccgatgaaccctgaggatatgcatgaaaacaagctcctactcacaactttttttgcctgaatggtaagtttgtctgcagggcttggtctgattgatttgaaggagcatggtctagaaagtggttctcaaactgttggataacagaatcacctggggggtctacctaaatgtgcaaaggcctaagtcttatcactgctttaatgaatgtaggtctctgggtttataatgagctcgtcagttgattctgatgagcacctaatttgataacaacatgtcaatgggtacagattctcaaacttggctgttcattagaattgcttgagtctcatttctagagactctgatttcattgatatgaagtgcagtttgggcactgggtttttttcttaaagaagttcttcaggggattctaatatcagcaaagttggagaaccacgggtctaggggcctcgctacccgatgtgttgtccaaagaccaccagcagcagcagcagccgcagcagccccagggaacttattggaaatgcagaatctcaggtcccacctaaaattaccgaatcagaacccgtattttaccaagatacccaggtggtttgtatgcccattaactcttgacacacacttgtttagggagtcaggtagagctggattcttaagcacttccggttagttggatgactgaaaaacctctctgagctccaatctcctcacctgtaaaacgagtttaaggaataacattaccaatattgcaggtttgctgagaagattcttgaatgcaatacctgaaactcagtttaattcctagaacagtgaaaagcctcattaaatatgaagtcccggccaggcgctgtggctcacgcctgtaatcccagcactttgggaggccgaggcaggcggatcacctgaggtcgggagtccgagaccagcctgaccaacatggagaaaccccgtctctactaaaaatacaaaattagctgggcgtggtggcgcatggtagtcccagctgctccggaggctgaggcaggagaatcgcttgaacccgggaggcagaggttgcggtgagccgagatcacgccattgcactccaacctgggcaacaagagcaaaactccgtcatatatatatatatttatatatatatatagtccctactagaagagagtccctgtgaacctttttttacactagtggccccagagctaatgaggccaagccccaccaatgatcgtcgtcacagacattcctgtttttctgatatttataaaggttccttttaggtatgaggtgatttttattcaaaagaacaaatgttcccagatgccaagtgtcttccgctaaaaggataaatgatcagaaagcaatccttagctacagtgtccttgaaggtgcattgtggaatcttgcactgttgtgcaattgtgaacaacttcatcagacagtactgcgtatttgtactgtgttatccttaatttttccctttagatcttaatttgttatttatttcttccctggccaagagctaatttctttacagaaactcatatatagggttccttttttcctcctcaagtcagtaacttctgcaattaactacttttttcttaatttctctaactttggcccaactaaatattttcccatcattcctgttttgccgccctcgagctaggacatggaacttacttgttcggaaaagcttctatctgattgaaagggcatgctaattctttctttatagtgtaattgtttcacatttaagagggaaggagaaacgcctaaagtaataccacagaagaaataccctcaactaatctttctaagcagtacgacaatgagtaatgattacagttaattaagttaggcaacctccatttccattcacttagtagcactgctaattatactcatgctacaaggtttctttagttcttctgtaatttggatgcagtactctttgtagacaagggaatacggtacgattaatgagatttttcccaccaacacctcctgttctctccaaatgaaatttccgcatctgaaaattgagagtagggaacggagaaaaaaaaaatcagtcacattttaacttactgccagcacggtccatgcttataattgccaaatattttatattaaagaaaacaaggtgtgggtttttttttttgtttgaaaccttgtaaaattgtggcttacgtaaaaatgaaataagtatagaacatggctttttaaaaatatcagtggcaatgataatgacactttatattgtatgcttttggtcgcattaaataaacatatgttgagcacatactgtttgccgggcactggatctactaaaaaaaaaaaaaaaaaaaaaaaaaaaaaaagcaaaccttaactgtaactctggatttcttttacatgaacttcaatcattttaacaacttactctaaagaaaaccaagaactgcagctctacttggttatattgttaatgaagtccttggaaaaatttagtttatatgctttgatcagatggggattgacatacttaagagttttatttttaatctgaaaatccacttcaatcttatgctctgggtaaacagtcattacagaagcctgacacaattctgttttttcaagaagcaggattcaaggtttaacttcaaatacaaatttgagtaagttatacggattattccttttaattctttttttaaaacacagggtttatgtggatgaagtttcgttcttaatctccatttgccttaagaattaacttctgcattgtggtttagattgagtttaagattgtttcagattttaaaatgtatttttaaaggtgtgtctggaggaagatatttgtatgtcaagcactgttggttttcataggaagttcaaatgtgttttcagcagcactggacgtttttagagttattttcttctcctagcatcacacaggtgcgcaactttataggtccagtctcttctttttgcttccttctctgcttctttttctttttcactaacaccagtttgcataaatgagtgcactgtcgagttcacgtgaataccagacaaaaatacaggtgtcttcataataatcagctcctctaagtctactttccagtttctgcttcagactcagataaatcctatataaagcagacgacacagttatttctagaggaactgaggttactgattagaagggaacgtaatcaggtagattgagccggtgagggaagaaaccattgctgtgagaggggagtgtttgcaaaatgctgtctgtgaagctgaatctgtgagaacacctcactattcacggcaaccggagtggaagaaacaggtgcaaaaagattgtgtgtttgtctgcttttgtgaggctggtcagagattctgtgcctgctttatctgtgcttggctatgactctacctccaggtttaccataccccatagaatgtgtaagagaaaagtaccaacagggaaatcagcaaaaagctttcctatgaaggtgtgtagccagcctccgcagaatttgaaatgtctgaggtctcatctggtgagtaaaagctgcagataaatgcaacagccattcagaagaatgataaattccacaagcattcagaagcaggcttccctaaaggtgactcttttggtcaatttgcaacccctgggatatatttggatgactcctgttccatatgcctttctataaaagttaaattggggcttttgttgtgaggaagggaagaaaggggtttgacaccaataacctataggataatgcaaatcactgaaataagaaggaacccatattctactttttgggttgtggctttaatgaactttgtcttcaggtatctaaaattatttctagtatgaagaaaagaaaaaaatatccagaccttaatctataaacgataatatttttacctcaaattaaatttctaaggacgtagactacattcataaactcattagaaaactaatgagggatttttatattaacaatagaaaaacctgtgtttcacatatatatatgggcttatttatgcatatatgtacatatgaatatgtgtatgtgtatatatatacatacacatatacactcacatttttaagaagtttttaatcaaagaagacggaaataacaaggatccttgtgaatagtaatttagacatgtttagacaagcacaacttattaggaagcaaactgggacaattgtaaacagtaattccaggctgcctaattatctgaaatatctcagaatgattttagaggttaaacacttattattaaatggtagcttctaaataaagtgaaaaggtgtagtgatttatcaggtttttttttaattatagaatatcctaaaattctaaattagcatatattctgttgccaatatatactgtcagtatatttgaagtatattaatttctaaattatgttacttttattaaaattccaaagagtttctgacttggacaagttttctctatctttaggaagacagctagtttttttttcaggggggtgagctaaaagagttaggataaagtacaccgcattaaattaaaaacgtgtgttgggaataaagacaatccaaagttaaaagtctatttggatctcaaattttcccataacttgatttgtaagaaaagttacccttttgcaagtcttctctctcatttggtctggactaagtggttgtcatttctcacttacagattgctgttttactaatctctttataaatatattttttaattttatatctgtattttattcatcagattgtcctggaagtacagaggccagttgatggtttatgagttcaagctgagccgaatatagctaagccctgtcttgcctgacatttcatcaaaagctgtgttgatttgcaatgtttaccgacctatttattgaaccttcacagcttgaactatgccaccaagctcgctgacattgctgagattatctctaaatgcatgtacaaactaaggaggaaattgaaaaataagttaaaaacaatcatccgtctatttattaaattatgcttatagagtccttgatttatgtatttgtttgattgttctccgcaaagccccatgacctgatttttctttgatcttcccacacactcttggaagacgatagattagaacagtggttctcactcttccttgagtgggcatcagattcacctggagggctggttaaaccacagcttgctggatgccacccccagagtttctgattcagtccttctgaagtggggccccaacctctgcatttttaacagattttttaggagatgctgatgctgctagattactaagaacagaaaatgagtgttctaatacaaagagcagaaaataattgttcttaatctagttacctgtgttctctttatgcgttgtttagtttacactgtacaagaaaataaacacatatcctcacaaaattgaagcatatattctactaaagattaatatattaaaatattgaataaaatattaaatatctatgttaggaaattgtattcctgctgaaactggcagtaaaattacttaaattacttagcagtaaaattactgttgacaaaagtaaacaattggtcattaggtctcaaatacgtaaaacctcaattttttttttttttcttgagacggagtctcgctctgtcacccaggctagagtgcaatggcacgatctcgggtcactgcaacctccacctcccatgttcaagtgattctcctgcctcagcctcccaaaaccctcaatttttaattactcctttgattcttattctctgcgatttctccctatgtaaagttttagtctattatatttttagtaaaatgaaagcatgatccatgagataagcacttgaatctatactatacatcaaagtctccccttttgggccattaaaactaagatgttttccaacttaccttaccaaagccacagtttgaaaactgaaactatgaaaaaactggatattttgcttaattataatgcttcgtaaaaaattagaacgtctttaaaaatgttaacaactaaagtcaaacattcaaaaattataacctttgctataaagttatatgttcattcattgtagtcactttcttttagtaaaatgtaagcttttgatgtattctaatggggcgcaacgtttagattaaatgtttaatatggataattgacttttaatgaaatttaatctagatgttcgtaactgagagttaggggtgaacatgcctttaaggatgtagacatttttattacaattattttctccatgtttttgattaaacatatcaaggaaatatatattattttttatttaacttttctaatgtattaatttttggccagtcctacctatcacatgcttcagcaataatcagagctttgatgacaatgtcacattattttaattcagatgttattccagtttgataagatggagctgatctttagaaaacaagtgtaccatatttctaatctttaaatattatattgaattatttcagcctggctcacttgccagtttttcccttttgttttcatgattaaagcaactgataattattaacatagataagatttatgacattaatttatggttttcttcataaaaataaagccttttttttttttttttttttttttttagatggactttcgctcttgttgcccaggctggagtgcaatggcgagatttaggctcaccgcaacctccgcctcttgggttcaagcaattctcctgcctcagcctcccgagtagctgggattacaggcatgcaccaccacaccaagctaattttgtatttttaggagagacggagtttctccatgttggtcaggctggtctcgaactcctgacctcaggtgagccacctgcctctgcctcccaaagtgctgggattacaggcgtgagccaccgcacccagccaataaatccattcttaacggaattttagagcataaatctgagaaaagaaactaaggctgtacgtactaggtctcctatacaccttgtctttcatcattgaatccttagtagttaatacctgcttggaatgtaatgggaattcaataaattaattaaataaatggatgagtgaatcctacagacaattttgccaaggaagaaaataaagacagggtatttttatttctttcggttttttttttttttttttttttttttttttttttcagacagagtctccctctattcgcccaggctggagtgcagtggcacgatctcggctcactgcaacctccgcccttcaggttcaagtgattctcctgcgtcagcctcccgaatagctgggactacaggcgcctgccaccacgcccagctaatgtttgtatttttagtagagccgaggtttcaccatgttggccaggcttgtttctaactcctgacctcgtgattcgcatgccttggcctcccaaagtgctggggttacaggcgtgagccaccgtgcctggccagggtatttttatttttattttatttttttgagacagcgtctccctctgtcgcccaggctgaagtgcaatggcactatctgggctcactgcaacctccgcctcctgggttcaagcaattcttctgcctcagcctcccaagtaactgggatataagcattcgccactacgcccagctaatttttttgtatttttattagagacagggtttcaccatgttggccaagctggtctctaactcctgtcctcaagtgatccgcccacctcggcctcccaaagtgttgggattataggagtgactcacaacgcccagccttttatttcaatttttactgctgtttgttttcttccaaatgaataataaatatgacattttattctgatagctattagattatgaattgaatgtgagaacaaaaggcattctggttttcgtttgttttaatattggactgaaaaaaaaaaaaaaaaactcatttgaaccgggcgtggtggctcatacctgtaatcccagcaatttgggaggctgaggtgtacagatcacttgaggtcaggagtttgagaccagcctggccaacatggcgaaaccctgtctctcctaaaaatacaaaaattagccaggttgtggtggcaggttcctgaaatcccagctactcgggaggctgaggcaggagaattgcttgaacccgggaggcggaggttgcattgaaccgagatcgcacccctgcactccagcctgggcgacagaggtagattctgtctcaaaaaaaaacaaaagaaagtagaacaaaaactcatttgagactttcaggatacaataatttgtttaccttttcagttttctgattcctcatggtgaaggaatcatatctcttcagtgacacacaaacacacacaggatatatacagttatgtgttaacaccagggatacattctgatcaatccatactaaggtaatttcatcgttgtgtgaatgtcacagagtgtacttacactaacctacgtggtatagcgtagtgcagacctaggttgtatggtatatcctatttctgtttggctacaaacctgtacagcatgtgactgtactgaatactgtaggcaactgtagcacaatggtaaatatttcaatgtctaaaacatatctaaccattagaaggtacagtaaaaatcccgtgttataatcaaatgggaccactgcggtatatgcagtttatcattgactgaaacatccttatgcagttcctatcttttcttttgggccacacttggaattgaaatggaagctggagaaaggaagaacatgaaataaactgatgtttttccagccagtcaaaactcagcctctgtgttttagagaaagcattcggaacacagttgagagagggagagaaagagaagtggaaggtttagagggaggtccccgcttgtttttatctcttcaagcagctctaaatttgtccaaagcagaaaaagttgtacttcgcttcactctatattcaagactcaaaccaagattaaacatgaacctgtgggaaagttctttttaattaaactcatgttatttgaaaatacattatggtaagatatttttttgaaagttaagagtcagattttgtctgcataatgaaaagtgactaaggagtgctgaagttatcactcaattatcaggaaatctagaaaaattactttccaataaaaatgagcatcaatgatttctaccacagccttttggttaaagagtaatgaggagaaattctgccatgtaattaaagataatgaaattatcaatcaaggctaagctgcattaggttctttgactaaaataattttatacaattttaagtataaattaagttaaaatatatacattgagtgtgtgcattaatgtagacagtgccaaatattcaacaaaattatttcaccacctttgatttttgttttttgttttttgtttgtttgtttgtttgtttttgagacggagtctcactctgtcacccaggctggagctcactggtgcaatctcggctccctgcaacctccacctccaggctcaagcaattctcctgcctgagcctcctcagtaactgggattacaggcatgcaccaccgtgcctgactaatttttatatttttaggagagacggggtttcaccctgttggccaggctggtctcgaactcctgacctcaagtgatctgcccatctcggcctcccaaagtgttgagattacaggcatgaaccaccatggccggctgatttaagcacctttggaatcataattattaatcataaatgaaaccaaactaaaaataaagtataccacatgtgagaacattccaatgaataaaatcatttctgtgtgagctagcctgctgttcaaatttgtttatgcttatgcttcagataatgtttacaaaagtactgacagattcctagaagcacaatttctaaacacttaccttggaggtttctagggccctaaaaatatttctagtcatttcaaaaaaccacaaaacaactacaaaaaatgtacttctcccaaaggccatacgtagcacatgcaaaaagagattctgcagagcattttggaacgtaagtagcttttgtggttctgtgtctcaaattagcctgttcttaaaagtctgcaaattaaaaaagaatgataggccaggcgtggtggctcacgcctgtaatcccaacattttgagaggccaaggtgggcggattacttgaggtcaggatgtcgagacctgcctggccaacatggtgaaaccccgtctctaccaaaaatacaaaaaaattaaccagacatggtggcatgcgcctgtagtcccagctactagggaggctgaggcaggagaatcacttgaacctgggaggcggaggtttcggtgagccaagatagtgccactgcactccagcctgagagacagaggaagactccgtctcaataaaaaaaaaaaaaagaatgataaattgagtcaaaattataaaaattcaacagacgctggcacagatttgagatttgaggaaccagtaaaaaacgtagtacatattgataaatggcaatgtggtgtcaagatattaaaattggttttaatcttattaaccaacataaaatatggaaaacttatacatttaagtgggcccagaaaaaagtttgcaaatagcattccaaaaatcgatagaataatgtgaatgctttgttttctaatcttcacataatagggttggactagatgatttataagatccagtatatagcccctaataataacccctttaaaaagtctttttttttttttttttttttttttttgagagagtcatgctctgtcacccaggctggagtgcagtggcacgatctcagctcactgcaacctccgcctccctgtttcaagcgattctcctgcctcagcctcccgagtagctgggattataggcacacgccaccacacctggctaatttttgtatttttagtagagacggggtttcgccacgttggccaggctggtcttgaactcctgacctcaggtgatccgcctgcctcggcctcccaaagtgctgggattacaggcgtgagccactgtgcctggcctaaaaagtgtttcaatagaggagagaaataaacaagatcctgaagggataagaagatgtaaaagttgttgctgatgttctgccgcatatttctttccccacccgagttccatgcagtatcttgctttgctataaacaggagtaagccagaaatatgaggggttgtgttaatgtcaccagaagcgacctttaactacgaggggatggaagtacttgaaaaaagcacgcagccatctcatcttctggtgcataattctgaggcatgttcctcacagcttctcagagattcaccagcaggactgagccccagaataatgtgctcattgacacacctttgattgcctccttacctttcctaatctcactttctctttcctctcacttgtactttttgtaatcaattgccagataaactgtgtacctgcacctcaaatccttgcctcagtgtctgtctggggagaatctaaagtaacacagaaggttagcgagaaattgtttcacatgcttaaacaaaacagggcaaaggcacttaagatgttagagggagggagggtgaggaaactcacacgggatgacttcactctgtttagtacctaaaagtgaacaggaggtggatcgaaaggaaacagttagtgaacctgcaaatcaataggaagggttagaagactggttatgggagatggaccagatagcccagtaagtgaagaaaaggctcatggaacagcagagaaaatggacatatatcatccatatattttgtttccatcctagtctaatttacccttagatactacaataatcccccaactcatctttgccacttgtgcttttgtccttttctactcactccatactctacatggcctaaaggttgagcttttaaaaacataaaccaggttgtgtcaatctctgattaaaattcgttactgctctgatgcgtccaatatctttaccaagaaccacacttcatttttcttccttttcttctgcagtcttgctgcatttcagccatactgacctgctgccatttctcaaatgccagtctctgtactgctattgcctcttcctggaatgctctcctcatccatcctctaactgccttgatcgccactgaatatacactaacatgcatattgtcagtcacgcagtagtagcttaatatgtatttgcggaataaactaatgggaaagagtaacagcatggttcagttgatggtggataatagtgatttactgagtcacaaacaacatcatctgatgccttagcaaagaggagtaggtattggagaaagaagacaatacttacaattctttacttccttgagctcattttatatgtgtgtgtgtgtatatatatatataaaacatatatatgacatatatgacatatttttgacatatgtcatgttatatgcctccttctctattatatatacaatgtgttcaaggaagtaaagatgttcaataaagttcaaggaagtaaagtctaaggtgtctttgtatgtagcactgaagtgatcagtcagagtccaggcttggctggatatcgaacagtggatgtgtgaagtagaagtgagtgatgccaattttaaagataatgagcagtttagtaggcaaggatttagtgtcagatatggaggttgtggttggcagtagtagtagttgtactgggaagctcttccacagtggtgaagaagcatgctgagaaaggccaaaaagtcaaagtagcatcttgctgtggataaggagattggcataaatggagtaaaagttgagggtgaaaagtgatgtgagacaaggacaaatagacaagttggcttggctaatgtaatacccatgatgtaagaaaagctatgctgagatagctaggctaattccaagggacttttgaggggagcatatcaggttatcacatgccaaaaatgtttcatttcagagactttagtcttctcattaattttatcgctaatccattcattttcaaaatgtatttcaggatttcacatcaggtcgactttaaatcttttgttcagatgaacgtttcttttcctaggactgagtaagacagtttgtcctatccagtgcttaagagtaaagcaagcttatgttgccactgcaggcaggattattaaataaccaattactattcagactgtgtcacatccctttaaattactcaagcaagagtcttggccgggcgcggtggctcacgcctgtaatcccagcactttgggaggccgaggcgggcggatcacgaggtcaggagatcgagaccatcctggctaacacggtgaaaccccgtctccactaaaaatacaaaaaattagccgggcgtggtagcgggcgcctgtagtcccagctactcgggaggctgaggcaggagaatggcgtgaacccgggaggcggagcttgcagtgagccgagatcgcgccactgcactccagcctgggcgacagagcgagactccgtctcaaaaaaaaaaaaaaaagagtcttgaacttgttcagcctgaacacatctgatatcctcagccaagtataggatgtaaattagatagcttctggctttactagtgtggaatcaggcatgctttttccccttaggactccatgactaatgacctgaattgtctacatttcaagactagtcagatctctaatggtgaacctatttcattgtttctgcttctgttttgtcccgtagtatatgagacaaaggatatttttatgtgcaaattgcaacaagttgagatactcctttaaaaatggattttctttccatagttgattagcgtatggtaccagatttcctagaaatgtttttatgataaaagtttcaggttctcgatgatgcaaggaaattacagacgttaggtaatgatttgtaatcaggacacatgagaggagttgtaactttactgcttaccctgtggctttgagaatcattaatcctcaatgggcctcagttttcatatctaaaaatactgctttttaggttcagttacttcaagggtcaaatgagataaaatatatgtgttataacaataaaatgtaataataaatatgaggtaccttttcccccagctttattgaggtataattgacaaatggcgattgggtatattcaaggtgtacaatatgatgatttgatacatatacattctgaaatgattatcacaatcaagttaattaatatatccttcacctcacatagttgccattataattttttatgatgagaacacttaagatctctcttagcaaatttcaagtaacaatagagtactattaactatagtcaacatgctgtacattagatccccagagcttactcatcttataactgagagtttctatccttcgaccagcatttccccatttttttccatccccagttactggctaccactgttccactttgctttgatgagcttaacttctttagataaaatgagttactttttgaaaaacaagtttaattggcaaaattgtatatatgtattgtgtacattatgttaaaaaatatatatatatataatgtggcctggtgaaattgagctataatagtagtgtttttaatgactatgtagccgaaagttccaaggctttcagctgattgactatgtaattcttaaatctagtagagtatcttctgatttgagagcagtatgaatcctggcagaaaactatgctggctatacacttttaagggtttgaactgtgttactttatctatatactctgcataaaatattctctctcctatacaggccagctcatttattcttgcttttctagtctgattccccctttctggaatctttttcctccatcgacttttggttctaaagcattcccatcttcaaaaattcaattcaagtcctagttaccacaacactttctctaacggcttgaaacacctcttttttctatgaacttttgttccacatagttatttctacccagttatcgacataattgcttgctaattatttcctgtggattaactttgattccataactttttaacttttttatagatttcctgagagcacgtgctgtgctttatatttctttgtaaatacctcagtagctctgcattttttttctctgtcatccaggatggagtgcagtggtcgatcatggctgactgaacccttgacctcctgagttcaagtgatcctcccacctcagcctcccgagtagctgggactaccagcgctccaccacacccagctaattttcgtactttttgtagagatggggttttgccttatcactcaggctgatctcaaactcccgagctcaggtgacccacctgcctcagcttcccaaagtgctgggattacaggtgtgagccactgtgcccggccagccctgtggttttttgtcgttgttttggtttttttgagactgggtttcactctgtctcgcaggctgcagtgcagtggcaccatctcggctcactgcaacctctgcctcctgggttcaagcgatttttctgcctcagcctcccgaatagcagggattactggtgcacgccaccatgcctggccaatttttgtatttttagtagagatgggtttcaccatgtgggccaggctggtctcgaactgctgacctcaggtgatcctctgtcctcggcctcccaaagtgctgggattacaggcatgagccgccgtgctcacccagctctgcatttttgaatcattgtttataaaacattgagcatcaaataatatgtttttaaatattgtataagtaatactgtgttcatagaaacgttttcttttggccgggcgcagtggctcacgcctgtaatcccagcactttgggaggccggcggatcacgaggtcaggagatcgagaccatcctggctaacacagtgatacaaaccccgtatctactaaaaatacaaaaaattagccgggcgtggttgcgggcgcctgtagtcccagctactcaggaggctgaggcaggagaatggcgtgaacccaggaggcggagcttgcagtgagccgagaccacgccactgagctccagcctgggccacagagcgagactccatctcgaaaaaaaaaaaaagaaatgttgtcttttacaaccatatatttatcatatttatcagtagtttaggcgtggtcttgaaaaggaacctccccctaccataatgcctttcgtttaggagatccccccattacacttgtggcttacattgaaagaaaaaaaaaattatccccttgtctatggtagaaaactgtgtcattcgtggctttgactgcatcacaatccattttagctttttgtcacttaacttgagaagaaatgaaatatatgtggagtgtatatccctgaagaaagtaaaggaccagctgttatcactatagagtttgtattgttgctgaaaataatctggttatgtttgtaaggattaagtagtttattcaacagatgtttggtagtaaacatgaatgagaaaaggcttgttcttatcatattcattatgaatgctgaggttgtgctttactacatgttttcaatgctcatcctaactgaaagtatgaagtggaaggatcaatttctgaatatttaaatgagatgttgattgccttgttataaacattaacaattttcctaagtgtttgctcttgagatagagcatctttaggagaactttatgatttgggctggcagatttagccaaattaacaggaatgtaccttcctaatgtgatcattcatccctaggaacaggaatctgggaacactgaggctatacttctgtatggtgagttatcaaagtgttaaacacaggcactattaatgaagcacagattctactttcagagtaaagctagtgttactatctatgaaaaaatattattatttatgttttcataataataacttctacattatatttattttcaactttttagaataaatctgagctaggaggttcttattttagttgttttccttctatcgtttttcattacgctcttgttgtttgatttggtctcacattttaaaaagcttactgtataagaaagttttatcttcaaaataatgagcactagaggttactataaatggaaatacaaaatgtggatttactaaagtgttttgacttttacctacacatttcttggagtaatttttaagttgaattttaagaattattttgctggccgggcacggtggtggctcacacctgtaatatcagcactttgggagtctgaggcaggcggatcacctgaggtcaggagttcgagaccagcctggccaacatggtgaaaccccgtctctactaaaaatacaaaatttagccaggcgtggtggtgggcatctgtaatctcagctactcgggaggctgagacaggagaatcgcttgaacccgggaggtggaggctgcagtaagccaagaacatgccactgcactccagcctgggcaaaaaagtgagattctgtctcaaaaaaaaaaaaaaataataataatattgccatatattcgaattacacaataataccagattgaggatattagaggaaaacaaatattatattttcaatatttctaaagtattttttgtcttggttatttttatggaattatattacatttatagtataacctaactcttaaccattttgaggggtaagtttaaagattaacttatcactattgacgaattattcatctacccgtggaagtgtctgcagtttatccatttcgaaacatctaatattacatgagaatttacttttctcattagattacataaacatcatgttaaaatgcaatatgtacatgtgacaactgatcttttgggaaaaaaaaagtccatgaatcactcctgtaacatttggaattaaattcattaaccaaaataatatcatgcttcatcttttatattttgcttccttagcatctggttcttagtctgtctaattacattataatggctctgtgttacaacagttgctagaagatttttttgggggggggggcaagaatgatgattttgcctcatattttggaatacctgctttgcaaatgtctttcctatatactagagccagaaggaaacaaatctaatgtttcttattcgtttgaaatttattgggagaccaacttcattcaaagatcaagaactctaaaatttttacatcaaaaactatttttttccccaattactttgttgagtactgcacttccagtcttgagatcgaaagtaatgttgaggccgggcacggtggctcatgcctgtaatcccagcactttgggcggctgaggcgtgcggatcacctgaggtcaggagtttgagaccagcctggccaacatggtgaaaccccgtctctactaaaaatacaaagaaaattagccaggcatggtggcgggcgcctgttattccagctactagggaggctgaggcaggagaatctcttgaacttgggaggcagaggtcgcagtgagccgagattgagccgctgcactccagcctgggcgacaagagcaaaattccatctcaaaaaaaaaaaaaaaagtaatgtttagccttgaaattgctaatacaatggacggtatccagcatatttcttttttgtatgcaattaatatttttactttatttattttatttatttttttgagatggagtctcactgttgcccaaactggagtgcaatggcgcagtcttggctcactgcaacctctgcctcccaggttcaagtgattctcctgtgtcagcctcccaaagtgctgggattacaggcacgagccaccgcgcctggccgatattcttactttaacagttgaataagttaatattttattggagctatgcaattagttaatttcatatagtgaatatattaatatcttatgaggaagagccacaattttagtataataatgtagataattataactcaggaggactatgatcaagatacactgtaaggatccttcaccatattttaccaaaatattattttatagttcaaagggggataggacggtacacttccaattatgctgcaaatttgttattattactgaaaaagtctattttcttcttcaagcaattaactattaatgtctttaatgtcaataaaccgcatagcgttatagactctctttgaatttctctgaattagaaataatttttgaataggaagattaacacagactcattttaattctgtaatggtagaaataattaatctccccttatctgtagggatacgtgttctaagacccctggtggatgcctgaaactgtggataataccaaaccttatgtatatattatgtttcttatatacatacacatataacaaagtttaatatatacattaggaaccataagagattaacaacaataactaatattagaacaattataacaatatactgtgataaaagttatgtgaatgtggtctctatctctcaaaatatcttattgtactgtactcatctatttttggactgcagttgatcatgggtaaccaaaaccatggataagaggcagactactgtgtattttattatatgcatgttatatataatatatgtaatatatattatttgtatccatttggcaaacaattgagatttttatttcatgtagttgctttttgtactaatatagttatatggttgttggaattatgtcattaaaacacattaagccaagcatgctggctcacgcctgtaatcccagcactttgggaggccgaggcaggtgaatcacttgaggtcaggagtttgagaccagcctggccaacatggtgaaaccccggtctctactaaaaatagaaaaaaaatcagccgggcgtggtggcaggcacctgtaatcccagttacttgggaggctgagtcaggagaatcccttgaaccccagaggcagaggttgcagtgagccaacactatgccatcgcactcgaatcgagcctgggcaacaagaatgaaacttcgtctcaaaaaagaaaaacacacacgcacattaagagaaattatgtttgtcgttttgtttattctctaatttgattaaattgaacagaataataagtcacgtatggcaataccaaatattatgctaaaaataaaacactgaaagctgaaaaattcaatcacagattattggtttatatgacatcaggcttcaggctgataggagacgtccaaatgataggcttattttgttccataagtattgggcacggttcttagtataacaaagaaataaccgtggattgagaaattgttttcctcaccttcattacttaatagtagaattcccttcaatgtgccacttaatattccttgatgtcagagccttccatttgagcagctgaaattattgacacccctctcattcttcaaggatgtgttgtagggactgctgagtttctgtagaggtttaagctttgtgggaaatgatgttgagtatgacaatgttatcagcaacattgtcaacttcatggttgcctattgacttagggaaaagtggagaaaaatatgacaattgctgagtgcttagttgcagtagctttttaattttaattttcaagcatctgtgtataagcaaaagaatatacacagtgccacgtatcatacccattgacaagtttatcagattttaattataataaatattttaattaaaatgttttttaaaattattaattttaatgaacatcaaatttctctcttgtgatgtgataagggcagtgatagaactgacatttgaacgttcaatacacaattcggccaccattcaataggcttggattgtgcccatggttctgttctgtactaaagacacaaagatgaacaaataaaaactctgcccttgaagccatacagtcaaaatacagtgtccttaatctggggtccatgaaccatgataggaaaaaaattacatctttattttcactaacctgtaactgaaaatttgcatttctttccctttatgaagataagcaacacagaacggtattagcaatatctgtgaatttattaccaatatttttatatcaaatcctagttgttttggatatcttgaaaaatcatatgttaatatataccagtggttagtatactaatcactacttttaatttgtattaattattatgcttataactaatgtattaatagcatataatagtattatattcagtattttacaattgcaatataattaatttcctttgttttttatatgcttttagttttcattttgcacatttgaaaacagtctgggaagtgttccatatgcttcaccagatgccaaagggatccatagcacaaaaatagttaaggaccccatatctagaagagacacaggcaagtacatataataccatggtacagaaaaataacagaggcttgtaccatatgctgtgaaattgggcataactctctcagtccaaaggactgaagaggaaatttttgatttggccttgaagcacacgtgattgtttctctagtggtaacatgtgagagagggcattctaaaaaagagaaaagtaggtgcaaagtcgaagtcacccggtgagagcttgcagggtcagggaacaaagagcagtgtactgtggcaatgtaaacaaacaaagaaacaaacaaaaaaaccttttttttttttaaaccattgttgggcatcctattctgttttcatttgtcaatgtgcaagattgcatttgccaagcagtttttattaatcattagtgagtagaaactattctctggctttttattttaactgactatatttcatatagacaacaggcaagaaacatcaaagaagagatcaaagctctgcattagcgttttaaatctcattatttcaaacaacatctacctgtaaggggaaaaaaaaccgtaaatctttttcacctccccacttcgtcgttgttttcagacaacgatcagtcacttgtctggcctgtgggccataattggctacctgtaaatctcaagagactgaaccatgtaactggaataattttttttttttagcactacactacacggctgttattcagttataatggtcaaggaagctttagatgctgtacttaggctttctaaatgtgtgctttatttggctttctgggagaaatgtcaatgtgaatttccagattataatgaagttcatccagaaaaacaactatgatttaaagaagcagaagaaacaaaccggactgaaaaaatacactaatagactaagatagtgttttcaaactgttctagattaagacaattttgcttgcattctttgttgagcaagaaggttcacatcttaacttttccaataatcctctttaagaccgttattattggccttgatttcaaacagaaaccagcagggacctgaatggacactactagttaaccagtctaaagccttatgttaaagctaaacagttatctctaattttcaaaacaatagcatgagtatatattaaaaagtggttgatctagggaacttaatattccaggatgaactatactaaatgaaaatatgtaacacattaaaatgtggtcaaacaagccatctatagctgatagtacaaattgcatatatatctactttattaaaattttaactggccaataaaattgatactataattctaaatataatttttatttaagattacaagttttaaaattgaacagacttaggtttaaatcacttctctctcttcttctttttttttttttttccgaaacggagtttcactcttgttgcccaggctggagtgcaacggcgcgatctcggctcactgcaacctccacctcccaggttcaagcaattctcctgcctcagcctcatgagtagttggccctccaccatgcctggataattttttgtatttgtagtagagacgaggtttcaccatgttggccaggctggtctcaaactcctgacctcaggtaatccgccctcctgggcctcacaaagggctgggattacaggggtgagccaccgcggccagccaaaatcacttcttaaatgtgttattctgggcccagcacggtggatcatgcctgtaatcccagcactttggcaggctgaggcggtccgatcacctgagatcaggagtttgagccagcctggccaacatagtgaaaccccgtctgtactaaaaatacaaaaattagccggcctggtggcacatgcctttaatcccagctactcgggggtgctgaggcaaaagaatcccttgaaaccgagaggcagaggttacagtgagccaagatcatgccactgcactacagcctaggtgacaggtgacagagggatacttcgtctcaaaaaacagaagacaaacaacagcaacagaaaatgtattattttgtattagcttagctcagcatgtttgcttgtatgtaaagtagaactgaaaaaaaaacctaataaaattaaaatagggattaaatgcactaaaatttgttatttgttctacgtatttcaaaaatggtagtcattctaattatttattttagttaatggaaacattagttttattgttagtaaaacaatatattgttgatacaatatctagcataattttgcctcttaatgaatcaatcagcttgtcctttttattcatattttccttaattataaaccaattttttaaaagtcataatctatcagtagaaatggtactttattaaattcggagaatagtatcatttaaggaaaaatattcctagataaaaaaatatacagtactatgaaattcacatgcatttaaagtcattattaatttataaagaatctggaattataacctgaactaaataattctatttttttgctgaatgaatgaataaataaatgaatctttaggaacttgactgtcctccactaaagttaatgactccttcaacatattacacattctgttgctttgttctcatttctattataaatgcaagtttgcttttttgcatatggaatcaccatctataaattcatagtcaatatggggttttaaataatcattaccatggaaattatacttaagtattagttctgttggttggagattatgaatttctaaatttaaaaaaatgctgatttaaatttattatttccagtgccctatcctatttttttttcatatctgctactgccttcctaataaacttgtttagaaatatatcttgacagcaaatggtattttattcctaccctcttggcatgtattatacacaaactttgttttttgttgttgttgctgttttttttgtgtgtgttgggggggggggggggacagagcttcgctcttgttgccgaggctggagtgcaatgatgccatctcggctcactgcaacctccgcctcctgagttaaagagattcttctgcctcagcctcccgagtagctgggattacaggcatccgccaccacagccagctaatttttgtatttttagtagagacggggtttcaccatgttggccaggctggtcttgaactcctgacctcaggtgatccgcccacctctgcctccgaaagtgctgggattacaggcgttgagtcactgcacccggccttaaacttcttttcgaaagctttctcttttatacgtattgagttaattcctgtttgcgctgtgacatctacctgactaccacaaaaccttacagccacttgcttctgtaaatggaaaactgccctagcatgacaggatgtgggctgaagacataaccatatcgaaaacagcaagctttttggaaatctgtgtttggccctcaatttcatggcctcaagtaacttgataattttctatttctaatgcctgtcagccacaacaggatctgataaccaactaaaatctctgttggaagtgaataggggaaaataggtgaaatcacatttgatgttgtaagggaagcttattgaagacagtggatgtgttcaaaacattatgaggcaaataatgaggaggaaaaaatatgaggaaatagatcaccaggaagccctgtgaatgtttatgttttggctttacatgattactagtaattaaattagtgaaaaatattttatggaatattcaatatgcccttaatgtacaatttgctgagcaataagaatataagactacaaacttcctcttattggaatatacattttattttttattttgttgtacttcaatagctttagggtttcaagtggtttttgcttacgtgtatgaattgtataatggtgaagtccgggattttattgagccgtcacccgagtagtgtacgttgtacccaatatgtagttttttatccctcattcccaccccctccacttctgagtctctgaagtcccttatatcactctgtatgcctttgcatactcataagttagttcccattataagtgagaacacacagtatttgattttccatttctgagttacttcacttagaataataacctccagttccatccaagttgctgcagaagacgttatttcattgtttatatggctgagtagtattctatggtgtgtgtgtgtgtgtgtgtgtgtgtgtggtgtgtgtatctcacattttctttatccactctaaggtggattctatatctttgcgattgtgaattgtgctgcaataaacatatgtatgcaggtgcctttttcatatagtgacttatttttattttggtagatatgcagtattaggattcgtggattgaatggtatacctacttctagttctttgagaaatctccatactgttttccagagaggtattaatttacacttccaccagcagtatataagtgttctctttttatcttgtccatgccaacgtttattgttttttgactttttaataatggccattctggctaagataaggaagtatctcattgtggttttaatttgcattcccctgatgattagtgatgttaagtattttttcatgtatttgttgatcatttgtatatcttcttttgagaaatgtatattcttgtcgtttccaagctttttaaagagattgttttcttcttgctgatttgcttgagttctttgtaggttgtagatattggtcagttgtcagatgcagtttgcaaatatttttttccattctgtcggttttctgtttacgttgatggttatttcttttgctgtgcagaagctttttagtttacttagatcccatttgtttatttttatttttgttgcatttgcttttgaggtcttggtcataaattctttacctaggccaatgtccaggagagtttttcctaggttttctttgaggagttttatggtttcaggtcttagacttaagtctttaatcctccttgagctaatttttgtatatggtaggagatagggatccagtttcattcttccacatgtggttgtcccattttcccagcaccatttattgaataggctgtcctttgcccaatttatgtttttgtatgctttgttgaaggtaaattggttttaagtatttggcttcacttctggcttctctattctattccaatggtctatgtaggaatagacgttttaaaatgttgcaattggaactatggataaacctttaagataataatttttagccactgttcattttaactgggggagaatgggaaaaaagtttaatcactttaactaaatcagttactttgtttacatatatttagctctgataattacaaggagattcacttttgagtttgaaaagtagattctaatgcctaatgagagttttcacattgtctttgagaataaacactattttaggttattactgatatttcagtttgtgaactaataattcagcttgtgaattttacccaattttataaattcacttttcttacttgggcgtctgtgtttgaattaagaatggttaaatgtttctttcatacgcgtccgtgtgaagagaccaccaaacaggctttgtgtgagccataaagctgtttatttcacctgggtgcaggtgggctgagtccgaaaagagagtcagcgaagggagataggggtggggccgttttataggatttgggtagataaaggaaaaaggggggttgttctctggcaggcaggagtgggggtcacaaggtactcagtgggggagcttttgagccaggatgagccaggagaaggaatttcacaagacaatgtcatcagttaaggcaggaacaggccattttcacttcttttgtggtggaatgtcatcagttaaggcaggaaccggcaatctggatgtgtacgtgcagatcacaggggatatgatggcttagcttgggctcagaggcctgacagtttctacatgatagtctctttattcaaaagaaacacactacattattattttaaaacgttattaacatatttttctgtgctagaaaattttaagaaacaaacatttaagtgggctaactcatttagaatttgtaaaatatgacaaaactctaggagaaagtttacctgtgaaaggagtctgttatgtaaatcaatagtgtaattatgattcaataaattatataaattcctaatgagcactatcaatttttcttttgctaaaatctactgatattctacttttaaattactctcacttttagtgttcccctgaggacttatcagtttggaacacttaaatttgagttatcgttctgttcttaggaaaaatatatttaaagaaataatgatttattatgctagatttatcattatttttatttgggattgcttttaatgtgcatgagttacaaagacataactgtgagatcccattttctataatttttttagtgattccatacatttctgagtttacattttttaaaaattatagctcaaaaaatgcaagacataagtaagtatgcttttctaatgggtcatttcagtcgcgtccgtgtgaagagaccaccaaacaggctttgtgtgagcaataaagctttttaatcacctgggtgcaggcgggctgagtccgaaaagagagtcagggaagggagataggggtggggccgttttataagctttcggtaggtaaaggaaaattacaaagaggggttgttctctggtgggcaggagtgggggtcacaaggtgctcagtgggggagctttttgagccaggatgagccaggagaaggaatttcacaaggtaatgtcatcagttaaggcaggaacaggccatttccacttcttttgtggtggaatgtcatcagttaaggcaggaacaggccattttcacttcttttgtgattcttcagttacttcaggccatctgggcgtatacatgcaggtcacaggggatatgatggcttagcttgggctcagaggcctgacaggtcagttatggaaacacatcaaagtactctagaaccaaaagttaatttttgaaagaaattaacttaatgtacagattttataggaattctggacgtatttaatatcgtgatgctagaagaatgtcttaccaattaatattactggatttcttgttgtgtatcaagttgtaacagataccttaatcacctaccagataggctcattcctgtgtccattccaatagaactctgattttgctcagatctccatcctcacaatttcacagtagtcttcagtaaagaaatgagactaccccttgtcacagaaaatgaatcatactttaattcgcttatatgcttccataccacttgccatttacgggtttaagtatgtgcatgagatgcaacctgaaccaattaaacatcaagtaagtttttcttgccaatgaaaagcgttcacttaacaactaaatgcttgagcatttatatgtagatatatatgtacatatatacgatgtaaaatgtagaatgcccactgattcatttataatttgatatgtattagtatgtatttaataagctcttataagactgaatggactctggatatgaaataatataccaagtatggtaacacatggtaacacatggacaaattgtagtggaatcaataaagcattcagagaaatacatcattattatttattctcccactttaggaagatttcaatcctagcattaaatgtaacactgtcttttttaaaataaaacctccatttctaagaagttatttgatgagaaaatatttgagaggttatctgatgagaaaatttgaagaaaaaaattttaactgtacaaccagttaattagaactttgtcaaataacattgcctttaattcccagaaatccaatacattatgctcagtgaactgtaacacctgagtttttaaagtggaatacttaaaaaaaaaaaaaaacaaaaaaaaccagccttctggggtaatatctcctctttggaagtttctttttttccaaaattatacttaaaggacgattcttttaatgaataaattttagagttatctcaaggaataaatagaggaaatattattttatttcaaagagaagaatgtctattgtggcaaacaacaaacctgaaataaataaaacgtgacagtctatgaagtccgtgagcctaaagaacaatggttattttactgtcttagaaaagtttaggaagtttggatttgaattcaaactttaatttgaacttataacgtcaacttgaaatcatttggaataaacattgaaaaccttctttgaaagttttatcaaaggagaaagaatttgaataccaagaggatggaaaggttaacttctgttatctgaaatatcttcaattgccttgagccagtttaaaaataaacaagcttactgatatagagggaaacaagtctaccttgtgaatataatttaaaaaagagaaaaaatgtcatttaccatattatttacttcctcattttagaaaagggaataaacatttattaattatgcactatcaggcactacgcattcaacacacactatcacattagttcttcccaaaagccatttgaagtagtttttctttctttttttttcttcttttcttttctttttttgagagatggagtcttgctctgttgcccaggctggagtgcagtggcacgatctctgcccgctgcaacctccgcctccctggttcaagcgattctcctgccttagcttcccaagtagctgggactacaggcatgtgccaccacgcccagctaatttctgtattttttagtagagacggggtttcactatacgttggccaggctggtctcgaactcctgacctcaggtgatccgcgtgcctcggcctcccaaagtgctgagattatgggcgtgagccaccgcacctggcctgaagtagtttctcttatgcccattcatcaatatagataatagggttcagagagatttttcagtaatttacacaagattttacagctcctaggtggcagaatctagacttaaatttagatctgatccaaaaactgtattttcctagctttagtaggacattaacaatacaagtgcctctttaatatgcttaggaatgcatttttatttatatgtaaaaccaaataaacaaataaacgctgcgattgccaacaaagtatctttaatgtaagaatttcaaatgctgtgcaaaattatcctcactaactgctcttctggtcccacacttgtcacatggctacagaatatactatatctctctttctcttccagcagcttcctagtggccacacagggaccatcctatccataggttatagttgctttttaaaatctaggcatttcctaggagctgatgagattttagaagaggtgatattaacatgaaaaaattggtaggggtagatttctgagatattctatccaaattcaggagttttacaattataatttagttaaatattgtacttgatacacatataattccattaatacactctgagttaattgattttcatttattactcatggttttcattttttgttttttgttttttgagacggagttttgctcttgtcacccaggctagagggcaactgtgcaatcttggctcactgcaatctccgcctcctgggttcaagcgattctcctgcctcagcttcccgagtatctgggatgacaggcatgcgccaccatccctgactaattttatattagtagtacagatggggtttcgccattttggtcaggctggtctcgaactcctggcctcaggtgatccacctgcctctgcctcccaaagtgctgggattacaagcgtgagccaccgtgcccggcttcatcgtttccatctttaacaaagaaatacatgatatttaaagaaattttaaaagtataattttaaaacagagggaaagccacccacagctaaaacatcctttctctaaacagtttattttttccttaataaagttagatattttttggtgtctaactttgcattgtaaaacttaatcattacttacattgctccataatattctgtcatatggttttgctgtagaactgatactgagttggtgtgccccttgtaagaatagtccagtcattttaaaccagcatctgtttggattgggccagcatctcttccagtgtccttgagtcaacaatgccttaatggtttctacatatatttttaaatattacctatagatagttcattctttatcttcttatgttgcgtgtcagagctattacgttagagctattatgtaattttggcttttttatatatcattgcaattaacactcttgtccattaatctgtttgggttttttttgttctctagttgacatcttatgacaaatcaataggtgtgtaaactatgtcgatttttcttggctgtaaaaaacagtaaagaatgcttacagtacacgttgtctttatgaaaggaagttccatttgaagaaataattaaaaaacaatctgttttgcctttaatgggcaagatgaagagttaatgccactatatactaaatatcttaatctcgacatgaaatgagaactattctagagatatgtttctagatagatatggaacaaccacaagttcatacaaaatttgttaattttaagtcatattttggacttttattaactcatatggagtgacgaacaaatccttaattaatagcagacatatcatcatctctggatgcttatctatcagagatcagcaagaaaacaaacacacggcatgctaaaatgggtaaactatgagaggcaataagaaacaatattcaaagttgtgggtagggttaagggaaactaatgaatactgtgatgcaggtggcccctggctctggggacaatagaaagacataacccaccactaggcctaaaaaaggtaaaatgtgagggagcaattactagatcctggaaatggaggagctgaggagagaccgcccaacaagagctgtgacctttgaaaaagaaatacagccacttacaacctgagctcttgcaggtgtaaaaagtagaggtttctctccaaagaaactttcctacccatctaaatgggaataaatagtaacgtctcctagaagcaaaatttattaaacgacctgtgctaacattcttaaatatctactagccgtaataaagaaatcaatgtactttatgttcttagttcccacaatttagcctaaatatttgccctggcatgcttatactggtccaagcacgcattaggtcatagcctgttcctcttccttatttgaaggtgtttttacctttctcagcaagtaacttgtggaaacaagttacttcctccttcctttgttctcctctgcctttgtctcttttgaaaagttctaagttgctagccaatcgggacaaatacagaatgtgtggtcctgttccagccaatggaaaccggacacagcagtagagtaaacatgtcaggttataaatgaccctgtctcctttgttcggtgtactctcgtggcaaaactgctggcgagtgtaccctttctgcaaaaagtaaaaatgaccttgctgagagagttaaatttatgttcgagtgctgtttctttgcagcaccagggaacaagcattctgtttctaaataaacattgtttacatataacacagggaaggagcagtaaagaggatacagcctccacacacctttgaaaagcactcaagttataagtctttagtgccgtgctacttaagagaagggcttgggtttgccctaggttatggttatgctaagctcctcacaatttttataccacatccaatgacagcagacccattcaagcagaattggtttacaccatgagaaactataattcaaagaaagttagcaacttgctcctaggcatacccatattaaccaatattattcagtatatttatatacagcgcagagaacaacaattttaatggcattgtcagtattctttgatagataagcaccagttttgtgatatttaaaaagctattataggtgttgaggcttcgttttctcttccgctaaactgggatgaatctttctgaacagaacaaatacatatattctgtcctatctgggaaagattcaattatgtgttgcagtccaaatatgctgtattatatttacaggtaaaatcatactagcagaccagagtaaataactaggtaagttcctcttagtgacaataaaaagttatattgctcagatagtgctaatagaactttctgcaatagaaatgttctgtatctatcatgaccaatatagtagccaatagccatatgtgactattgagcccttaaaatgttactggtggggctgggcatggtggctcacacctgtaatcccagcactttgggaggctgaggggatgaattacctgaggtcaggagtttgagaccagcctggccagcatgatgaaaccccgtctctactaaaaatacaaaaattagccgggcgtggtggccagtgcctgtaatctcagctgcttgggaggctgaggcaggagaattgcttgagcctgggaggcagaggttgcagtgagcccagatcacaccactgccctccaggctgggcgacagagtgagtgagactctgtctcaaaaaaaaaaaaaaaaaaaaaagagtctcatgtataaatactgttttggacacacatcgttagaagacagtaaaggtgacactgtaaaaattttaaatcattaataactaattaccaccccaatgtaaatttcactgatcactgtcagtattaattctacagtaacatctgtatcaacaaatttccatatccctttcactggtattagggaggagatatcaaaagatggtaaacccagagcataaacttgtagatgtttggtaatgaaatgggactggacctatttgagattgtttcacaattttaaatcagggattggttatatagagctttctttcttgtattttttttctgcttctatgtggaaccatctagaatgcttgtgttattgctttaaggaaagtttttaaagggattcttaaaaaatacagtattttcctagcatatctctgaggtgataaaagtctaagaatcatagtttatgtgttttattcagatccagctcattctctcaactgttaaataagattcttgagaacaggtattattttttacattctggaggatccttatagcacatagaactatactgagaccaaactcgataatttcttataattttgattctgctggtaaaacacaaacttgatattgaaaatttgaatattctggacattataatttgcttatgaatcattctgtttgatattcccagataccctttgctaaggcagctcagaagggaaatatttgttcttgcagtttgtgtggttacgtggtttgttgtaaactttccctttgacctaaagaaatattgtccctttggccaggtgcggtggctcgcgcctataatcccagcactttgggaggctgaggcgagtaaatcgcttgaggccaggagttcgagaccagcctggcccacatggtgaaaccccatctctactaaaaatacaaacgattagccaggtgtggtggtgcatgcttgtaatcccagctacttgggaggctgaggcaggagaatctttgaatctgggaggcagaggttgcagtgagccaagatggtgccattgcactccagcctgggtgacaagagcaaaactctgtctcaaaaaaataaaaaaaaaaaaagtcgtctccaaaatatagcatggcttcaaacagatcgcattatctctctgaaacattttaacttatagatttaaaaatatatcttacagaaacattatttagaaacacaactttagtttacctacctctataaaatctccagagccagagtaaagattaaaatatgcattcacaaagagctttttaaatcatctctttattttacatctcccaaaaattctggaagaaggccgggcgcggtggctcacgccagtaatcccagcactttgggaggccaaggtgggtggatcacgaggtcaggagatcgagaccatcctggctaacatggtgaaaccccgtctctactaaaaatacaaaaagttagccgggcgtggtggcaggcgcctgtagacccagctactctggaggctgaggcaggagaatggcgtgagcccaagaggcggaggttgcagtgagccgagatcgcaccactgcactccagcctgggtgacagagcgagactccatctcaaaaaaaaaaaaaaaaaaaaaaaaaaaattctggaagaagtagtgtttgatttagcactcttaagggacaccatacatttgatgttgttaaaatagcttacaggtttatattagatttctattatctatcctgtcttcatttttggatatcatgtaaatatgttagataaataaattgagattgatttctaacaatttgtatgcattttgagatggcttagaaaacattcaatgcagaagttgatactgtgactcataccaagcatgctcctttgaatataagaagacaaaacttctgaaatgaggcaaatttaaaatatgacaggtttatattctggaggtagtgctaatagcccccaaagctactgatacatgagtttgtacactacagaaaagagaattaaaaagaaagtttgcacttcattgcagttccactcttgattattaatataaatcgaatgtaaattagtgaacttcctgtaaacacaacatgagcaatgactaatattgatagtctactcttaggttcccttgaaattgttctgcttgtctgataaaaccataacaagggacataaaaagattgttttaatatgttgagtgaattgtacatgaaaaattacattcccataaaaggctgatctatgaatgctaacatttatgttgttcgctatttctgtgtacttataccacccgtgtgagtgttgcttgatttggcagaagtaatggaattttaaaaagcagttgcatgagcaaatatatctattttccatatgtacatatttgcaatttagcaagtcatttgcttttgtttaaatattcaaaacgttgtcatatgtgtgttgtacacattaagattttatgtattttaaaaattatatatgtgtattgatatatttgtatgcacacagagcaaagcttgaaatagcaaaaggtaattacatgcatattgtatatactactttgtattaaaaatgtagtttattgatctttaaaaccaaatttgtttttgtaataaagagtaataaaaaattagattatgattttttcctttcaaatatgtttagaatttaaaaatcttggctacccctttaacctaaaatctgtcttacttacctcaaaatgcccttgatcccaactacatgaaatttcttgctctttcttttttttctttttttttttttttgagatggagtcttgctctgtcgccctgcctggagtgcaatggcacaatctcagctcactgcaacttccacctcccaggttcaagcgattctccctcctcagcctcccgagtagctgggattactggtgactgccacgatgcccagctaattttttgtatttttaggagagatggggtttcatcatgttggccaggctggtcttgaactcctgacctcaggtgatccacctgccatggactcccaaagtgctgggattacaggcgtgagccaccgcgcccggccttcttgctctttcttaaatatattatgtaattttatatagcacatgcatatttctgtgtctgggacacccttcctccctgtatctactccttgctatttcttctagcctaatttagatccctctttctatgtttctctggctcttttttcttaagatttgtcaagtcatgctgaaactattgccttgtctttctcaaaagactgtaagttcattgatggcagaacttaagtgtatattagtatctcccagaactcactcagggcctggcatagagtagcataaaagtcagtgttgttgaatgaatgaagaaatgaatagaatgataactgctttctacaggtgattgtgtgtaaacaaaaagtcatatgattaatccttctatgagcaaaagttggctaagattacaattaaatctgaatgtgaagattgtactgcagaaaaaaaaaacacacattttcaatagttatgtcacaaaagcaacccatcatgatacaagtagaatctgcgaacatttcttttaaggtgcgtataaactcatggcaaatttatgttgcattagtctttttgatgttctgaactttcataaaaaatcaacatagtatttaaaatctattgtaaaatatattgaagtttcattgattttattaaaatattaattcctttattttatatctatatataatataatcaaatctgaaaactcatcaagattatggcctagttgattacgtcttagttattatttgtacttttccatagccaacatgcaataaaagtttggttctagataattttttcctgttttacaccgtttcaatcaaaacatgttacaattgagtaaaacaatctgaaccagccttttataatacatgaattccaagattgtactaatttgtcagtttttgcttactgtctttcacaatgatttggagacataataaaatgtgcaaccaaattagtgaaaataaagaagtatatatataattgactagagccaaatatgtatgcagatttaaggcctgatgttttagttcactcattcaaattttaattaaaaacagtacataaaaggtgctagttgctggagtatgatgagaaaacaaaacagtaacaagacaaaaactgaaaacatgtttcctatccttgtgaaacttactgtcaatggggaagacgtacactcagtcagagaaatgttaatatttacaacgtaaagtaatatttacattatctgtattcagaaagagaatatcaaggaagcctattctgttggagtaaagagcttatgcaaagctcctattgtgggaaggaacagaaaggccagggtaactatatctaagaagaaaattacaggctgggcacagtggctcacgcctgtaatcccaacactttgggaggccgaggcgggtggatcacctgaggtcaggagttcgagaccagcctatccaacatagtgaaacttcatctctgctttaaatacaaaaaattagccggacgtggtggcgggcacctataatcctagctacttgggaggctgaggctggagaatcgcttgaacccaggaggtggaggttgcagtgagctgagatcgtgacactgcactccagcctgggcgacagagcaagactccatctcaaaaataaataaataaaataaaataaataaataaaaaagaaaattacggtgctacaagacgaggaggaactacacagaagcctcttcattcaagaaatgaaagctcctgagttcggatatctatcttaaaagcagtagtatgctattgaagaattgtaagcaaagggtgtcttgatcacattcatctgtcaaatagctctttattggtgaggttatgagaatgtattgaaagtaatgtaatcaaagcaaaagaggtcagttgcttggattaagggtgttggctaagaagataaataattgattcgtatgttattctgggacccctagaagccaaagaaaacggaaaataagaccaattataaaattcttattttcagagacaagaaatgccttcaggaaaagggaatttttttgtataattgtctactaaaagaaaatgttcacttatgactttagtgtatatagaccaatttatttagctttaaagtgaaattaatttcaggatatttggtagtaagttttagcaaaacctaaagaaaatagtaaagcacacatttctgttattgatacataatgatcagatatatttccatgataaatgtgatattataaagcacaacttttaaaaaacatttttctagagattatgccttaatttcagcctgtggaacatttctttaggagatattcatggctgctctgtgtccaactacatttgggagtcacctcatactgaatccttttatatactgggtcacttgcaaaggcttaattgagcatttgactgtcatatgccacagaatggatcggacactataaataaaacacaaaagagagtttgtcttttctgggcttcatcttcttaaaaaaatcagctattagacaagcatatgtaagtagtcaagaattatgataaattttctaaataaaaataagtgcatgagagagcgtaagagtatttatttaattcaggtttgggatcaggaaggtctcactgtggaatatttatctaaaatgtaaagggtgaaccaagaaaacagtgatgtggaagagcattagaaaatctggaagaaacacatgtagctgaagcaaagattatgcttattttgaagaaccttttagctgcagtaaataaaagacaccaaattacctccaattctgtaaagcagccttcatgactattcttcactttgttcacaatttattatctccagcccgtactaaatagataacatcatctcctacttcactgggggcttgaagggagaaaacagtgaactaaacttttacaagacattatttgtccagctggaaataaaaagtagaaaaaacatagaactttctatgtatagaggttataaagaccttaattgctttttaatttgtttagttcatgcatcctttgtcagtctgataaaagctgtgggactcctcagaaaaatacacagtgaatatcctttacatacaaccttttacataaaaatccagcagttcaaatgctcctgcaatccattcataagccattcataatccattcctaaaccagcttttggttaagtatccctgctttcaagtatcttgataaaatagtaaaaggaccagaagatacataaatataaatagaaaagtaaatagaagtgtgtgtctgctttactagaattttgaaatatcatgtttaaactataaattttaaatttagtttatggcttaagtacagatcatatattcccataaatgtgagtatatacatttatgtgcaaaccttcgctcacaaactcatatgcttagtgtttgagatttctcagtcctggactgagagttgggaaaaagttatgttttctttaacattctctcatagaaccaaaataataggagaatcagaaaaacataggcctttacattttggcttgagatcagcttctcgccatacctctagtacctcagacaaattacttaacatgtttgtacctatattttatctactttaaaatagaaaagaatacctaacacaaattgttcttatgaggataatatatgaacattgactgaaagatttaagctttttttacttaaaattatcctgttatagatagccttttctcaagaagtacataaaaataataatagtaaagctttgtgaccacaaaaagctacctacagtatatgtatgatgtttaacatatataacttgatatatataatatgacatatgcttgatatatataattagacatatgcttgtctaatagctgatttttttaagaagatgaagcccagaaaagacaaactctcttttgtgttttatttatagtgtccgatccattctgtggcatatgatagtcaaatgctcaattaagcctttgcaagtgacccagtatataaaaggattcagtaagaggtgactcccaaatgtagttggacacagagcagccatgagtatctcctaaagaaatgtatatatataatatcgagttatatataatatatatgttataatatagaatagaatattctataataatatagtatagaatagaataatattctatactatcatttaatatgaaactcacatagactatatttgtagctgtgggtaaatacatgtatgtaattttggtatatatacgtggcttatgagggtttttatggagacatgaatatggtgttaactaaattattataagtccaatgagctttgtgagatggccagtcgaagcaaacaaattccatgtatctccgaagccatttcctctagattgactgaaaaaaaatcaatttcctttaataaacatattttacaagctttgtagctatcacttacttcgtggttaaagtttacatctatggaagattacacagtaactttgtgctcacatgattgagtatcttaggggtttttatagatacatacttaaatatgtcagggaacttcatagttgtatgattggatgtactgggaacttcttgctccttctccttaatttgtgaaatcaagagacagagttactgcaaatttaaacttgagtaagtcctttgctctacttcatttttctcccgagaggcttctttttttttaaacgtccttttgtagaggcaaaatgtaaatattctctgaactctacttctgtatcttaccgtgaagaataataattagctcattaatttcaatttttgtaatatgcttaggtcaacaagattacttctaagggctcctcatcaaatacccctgtgtactttaggttcttttacttttagcaaggctgattcaaagttttttaattcataacttttttaaaaatttttccgagagtcacattgtatctcctttatactgacgtttattatcaggctgtttttttttgagatggtgtctcactatgatgcccaggctggcctggaactcctgggctcaagttattctcccacttcagtcccccaggtagctgggattataggcgtgagacacaattcctgggtttatcattttgtaaagctggagcaatcagttaagaatggagaagcaacagggccgcacggtggctcacgcctgtaatcctaacactttgggaggccgaggctggtggatcatgaggtcaagagatcgagaccatcctggccaacatggtgaaaccccgtctctactaaaaatagaaaaattagctgggtgtggtggtgcgtgcctgtagtcccagctacttgggaggctgaggcaggagaagtgcttaaacctgggaggcagaggttgcagtgagccgagatcgtgacactgcactccagcctgggtgacagagcaagactctgtctcaaaaaaaaaaaaaaaaaaatgaattgagtagcaatagatatcatgagcctcctcatggcgccaatattcgtttgaacccgccaacttcacatttagatatatgtgtctacgttgctggatgggccaggctatttgctcatctctcagttattttactatcctgtttcatctttttccataacactgttacactcacctttttgtgtcacttttaccagagccagtcattaatgaacaagaaatgtctttatttcatttcaaaaaagcaaaatatttctttgaaaattaaacagttaatttccaagccactcattaaagttattttattataagttttaatatcagaattataaaaatatttaatatgtcatctggtaattaatatttattcttttttttgagatggagtctcgctctgtcgcccaggctggagtgcagtggcgcgatgtcggctcactgcaagctccgcctcccgggtttacaccattctcctgcctcagcctcccgagtagctcttagcagcttcttaattaaagaatccatagctctctaatgcacatacgattgtgacatatttattcgttactttaagatcctcccccagtgttgaattctaccaattgcaaggtgcttccatggctttggacaaagtacagaagaattaaataacttcacagccttcatggaattcacagtaaggcagatcccatattaactcaattaaaatatatttagtcaaagccagatgcagtggctcacacctgtgatcccagaactttgggaggcggaggcggatggatcatttgaagtcaggagttcgacaccagcttgatcaacatggtgagacccctgtctctactaaaaatagaaaaattagctgcatgcctgtaatcacaactagtctggaggctgagacaggagaattgcttgaatcctccgggaggtaaaggttgcagtgagctgagatttcaccactgcactccagcctgagtgacagagactccatctcaaaaagcaataaaaataaaataaaatatattgagttgaatactgaaataggggtaactttgggaagctatgggccgcaaagcagagaatgatgcattcagtttgggggagctaagattagtttcgtaaaggaggtgacatcttgaagacatctagaatttcaatagacatagaaaaaattcatcgtaagcagagggactagtgaatataaagaagtcataaagatccaaaaagaactcagaaataatcaagaaggtgagggtagctacatcataattataagagccaactttattgagtacttcctttgtcaccatgtgctaagttctgtattttaatatcctcattgaatgcttgaaataatttctatgaagaaagatctgttttatctttattttactgggaggctgtgaaatatgcctaaggtcacacagctatcacatggcaaaaacaagattcaaacccccacagtttctaattttaaagcctcagcataatgaacacagtattgtactgaacagaatgaatgaatgtgagtagaaaagacatttctgagaacaaagctggaaatgtatcatacaaatcaaataaacatttcttgagaaatccttggggaagagggcaatataacctctcaaacagtagccagaatcatcaacacaaatatgtattttaagttctcacaattggtctcgccatatgaactaaatgctagatatttacttgcttaatgctaccaatgaattttcaaatctttccaaggtgttaataattttattgcttttttataccaagagcaagaatcaaatgttagttgctattgatgtttacattttaaataacaactttaatttagcctacaatatttagcaattacacaggaatcctctgaaagcttttaaccagccccagaagtaaactggctttggatgctaatctcttgagctttcctgactgacaagtttcctccctagaggaggggaattggcctgtctcctaaattttgcatggcctaaagcagtgagtttagaagcacctgtgtttcctggcaacaaacataacatttgtggaaaagtctaattatttaaattcctctgcatttttctaattgaggataaagtgctgcattctaccttcgcattcttattttattccttggccctttaaataaaaaaatacataaaatgatgtggtcagctaaaatatattggacaaacaaaacccccttcctttatctccctctatcgctctctatgtatatatattatatacatatataaaatatatataaacatatatatgaaaacagatatttgtgtgtatatatacactaagagatattatagtttaaatattttttaacatacactttaaaatctaacagcttggattttaatattgggtcagtctttctaaagtgtttaatattttagtttggaagtattaattagcaattcatgaatgagtaattaaaagtgctttagggggcctttcacatcctataataaataccaaaccttttaccacatttcatactataaaatcttggaaccccattatataactatgagttattaatttctgttacctacttttaaaatgggaacatatgttattaacaggtgttgctttgaaatctatattagcaaatgttctaccttataattagtttttgacttatcacaaaaaagtattttattttttttaattacatagtcacatttcaaggttaactttaaaaaattctaaattatctgattttcatgggaaagagatttgatatttgtgccttagcattttggtatttttctctttctgtatagcaaacctttgaatgatagtctgtctgaattcacagtgaagaaaatgatcagaatattgactgtcaacagataatttagaaggttcaatcctatgataatcagggatattttccttatgtaaatgtgttgatttatcaagttcagctatgtcattgattacatctaggcttcaggccttctgtgaactgccagctctactcaattctggcttgtgaatgttatcacatattttagtcaaatcagaggttatattatacacatctgacatttttctctttgtactaataactttttttctttttttgtttttacatcatggcataagatcaacactaaattttaggagtgcatagtaagtattaccatagtgtaatgctatgccaattgttttctaacttaatatttgcaaaactgggttttatggttgtttctatgcgaattgagtgcctctacagaattttatccctgagagtatatgagtggtgagtgataagagatactgaatgtctcagaacatactagcatctgacagcctattggtaagatagtgtaagtaaagaggataaggaaaatctgacttgaaaggagaataaaatctgattggacagtctgtagccaagtttgcatattatggatttacaaaatgaggttgttttgaattcttgattaatgaaacataaactgagttgttttaatattgcgtgccatttgaaataaaatgcattttgtcacaaccctagaaatgggaggttatgtgttgtaaaatattcttgttcccatctagaagacaccatattttatagagaacagtggctgaagcttgttttactaggaacaagtatggtgtaaggaaataacaataattaatactggtggcacttagtgctatagtaaaagtaaatttctaattagaaaataattaccataaaatactgaattatatctttgtaaggcctttagaaattgaatcactaatttaatatataagtaagtcaatattatttttatgagaaaatggacaacttacgaagttgttgttatgttttcaggccatattccatttttcaccaaacaagttatttccctgatacactcacttaaatcatcagtaatacatataggtttaaaaatgttttgtacaattctgaaagcctatcttagtttaatgaaacataataccataaagcttccctttcctccaacatttgagctacaataaaacaaccttgtacaactgataacaattaactcaccacccccaccccattgcagtcattagaattcattactaaaagctcatttgtttatggtaaaataaagtataagggttttgaaaccaccactgcaaaattaggactgagacagtgaaagagatctaacttaactgactccatcttgcttctaacctccactaatttatagtttatcgtttaaacaaacatcataacagccctttcccaaagcagaccttcttgcctggggactagattgcctctgtaggactaacatcagccacagtattagaaattatggtttaggagtcatgcagctggaggcaacaagattctgacccccaccaaactgctcctaagatcagtgcttgagataatttgcagaccctgcacttgatggatcagctggcactacccatatcaataaactggctcatctgatcttgtggcctccacccaggaactgactcagcgcaagaagacagctccaactccctgtgatttcatctctgaccagtcagcactcctggctcactggcttcccccgacccaccaagttatccttaaaaactctgttccccgaatgcctggggagaccgatttgctgatttgagtaataacaaaactccagtgtcccacacagccagctctgcatgaattactctttcttcattgcaattcccctgtcttgctgagtcagctctgtctaggcagtgggcaaggtgaaccccttgggtggttacaaatttgggggctcacccaggattgcccctgtggctacctgcctgttgtttggtggccccctttcagtgatggatccagaaggcagcccaagtggctgcctaattctcttggactgggggctgactctgttactctgtctactggtggggtattccaacccaatgtgcgtggacttaattgcaatggaaaaatagtcatggggagatgtcccttaactgtagccctattacagggtatctgtagcctcatggtggggtgtctatctgtagctccgttttggggtgtctggattggtgagtatcctaggtgctgccaatgcctgcttcattctcctgactggttctgtagccctatggtggggtgtctgtagccccattgtggggtgtctgtagatccagcatggggtgtctctgtctgttactccattgtggggtgtctgttcagctcctgggaggtctcagttcgctctttctaactagtaggaagactactggtttgggagacttctcttcaatcaggaagattttgaggaggtttctcatacagaaaataggaggatagtttggaagggatactcttggacttcttggttagggatctgatttggaaggccttctgtccctcttgtctttgcatgtgtttaaatatgtgaaagggatctcagaaggggttgctgatagaagtccagcatgcctaactcagagaaccctccttatttgtctggtcacattcagtgagctctaaagaaggctcaacagtcctgtctctcagggtgactatctgctctttcccttgcccagagacctcattgtgaattaccgttcagaggtcatccgtccccacctggtgtggatcaaagacaacagggaccaagatgaaaaattttgagctttgccaggctgatattgggtgcggaaagaggtgactaatgtctgttttgttatgtgtattttgctgggttggaaaatgttaattcagttccccatgcagcccgttgggcagaatcttgcaaattaagaatcttgtttatggttccataaaatggtaaagggtgattttatcttgtaaagtggcttaaaccccacagctatagcacaagcaagcagggtcgtaagacgccactccgttcttctggaagctgcagagaaagggaacccagaaacctggcatcccagcaataagggtaagaaattcttatcagtcaagtttctggtctctctctctctctctctctttctctgcattgttaaatagtaaactatttgtctcctctgcaagggtttggttaatagaaagaaggatttgtgagactaatcttagcacatctgatgtagtttgtgctaagaatttgtctttctgtgttatgtaatggagagagggatatcacgtgatagaacgtgggttaggacacccataagtctgcttttcaagtcagcttgggaggctggtcagctacaaactttgctacaggtccctgaaaccaatactctatgaaatttctctgtcttgttttgtgtccttaagagcttaaccttgtgaccatgtggggatactttcttttggtttctaccatccagaggacaggaattttggggttcatgtcatagttactcctaagatttttcttgagcagttaaaagccttgcaagcctgaaactggcttctctaggctccttctgggaaaagcagtagaaatttctcaacgctgtatatagctcagtagctaaggctttgtcttttgacagtggtggcctgggttcaattgttggcttctggaatgattcctttctgatttgttatttgtgtagctttgccatttattaagtttcttttctgatttcctctcttgaattttcctttctctggactaccttgtggagattctaaatcttgtaaaaagaaacttcttactatgtctttgcagcacctaggaggtttcctttggtaaagttcagaagctaaaaatattgtccacttggcatggctaaaattaggtaataagagatctaaaagaatttcttttttaaagagcactatggttaaaagtcagcttaattaagagtggataaacaagctatagatatatttaaaaggcctttatgtttttctcttcttggaacttgtttttttggaaaaagttttttcttctcagccgactgaattatttttctccatttttttctcttttttaatttttttgtcttgccactcttaacgcacacgtgagtccctaagataacttctggtagcctgggactcattgggaaaaacagaggaggcaccacagaacccgttttagggaaaaaaaaaaaaaactgttttccacatgaaaccccaggaattaaaaacagatggatccctctcaaaatcaaagactctgctctgtttttcattgtgttatctgatggttttgagttttggggatatcagaaattacttcacattatgagggagctttagtgtgtaataactagataggaaatatactttaagggatggctaatggtagttatacagggatacttgactctttgcacacttggatccagagaagcatgcttttggtcacccggaagataaggaaacattcctcaccctccactgggagatcagactcccatgaaggacgggctgattacaaaatgggctgattgactttgggttgccttgcaatgaaatgcagggtatggccgggtgccgtggctcgtgcttgtaatccaagcactttgggaggctgcactttgggaggccgaggagggcggatcacttgaggtcagcagtttgagaccagcctggccaacatggtgaaaccccgtctctaagaaaaatacaaaaattagccaggcgtggtggcacatgcctgtaatcccagctacttgagaggctaaggcaggagaatcccttgaacccaggaggcggaggttgcagtgagctgagatagcaccactgcactccagcctgggtgacagagcgagactccgtcttaaaaagaaagaaagaaacaaaaataagaaaagaaatgtagggtagaagcactgtactgtcttctcccgtagtatttctctccttttgggttgcagtataaaatggtgcccttaatttgggagttctgtctttgccttcagctgtgattaagccttagaaatgcatactttcctggccctgttcctccaaaggctccaccctgaagccagtaatctgattaagaaactggcaaataaaaagtcttatcagtgccaaatcttctgtctgtatttacatgtgtttttgtgtgtgtgtgtgtgtgtgtgtgtgtgtgtgtgatgtttataaaagagctctgattaattggcttggaaaataagtgcttaaataaaaaaatattttgtcagaaaaatagaaactttgatgactttttgttcacatgactttagtaatcttttggcaataaagacaattttaaagattattgttaaagtaaaatatcttgaaaatgtagacatttggtctaaattaaggtcagctatcagatttgctaaattctttaaggtcaaactgtttccttgactttggaaaattgttcaatttatttactttggagcattatattatagatgaggcctggggacacgtggagagctatgcccctagctatgctgaaaagagtcagaccttatcttcacttctgtctgatgtcctaggctccatccctagcatataattaaaatagcttttttatcaggtttttcactaaaaatcaaagttgctaagagttaacattgtaacatgaaatcgaggttactggagaaacagttttacatacaaggtgtgtagggaatgtgtttttggtgaaagataataaggcataggaatatggcttttgttgaagagaatgtaattttgtctagttcagaggttttaaagactgtcttaaactaaaagagtaacggaacgaaactgagggtttaagcaaagtgaaaagggtttatacagggttgatcctgaaaaaaaaaattctgtgggtataaacaagttggctaagatttgaaaaaggttatttagctttttctataggttaaaatattaaagtcatactgtggggccagaatctgggcccatgtgtccaaataacagggtcttcttagaaaattgatctgctgtttaatggaaaattataaagcgttctaaaaagtttatgagaatgtcaccttgtggtcaaactaattaaaactggatagatacataaaattttatttaaaaactagctttagcattaaagatgcactaatgcgaacatgaaatttggttttctcttttgaagacgatttttttgtaacgttaaaagataatgaaagggtttggctttctcctttgggtaaatggcaggggaaaaggggagagagaagagacaaattcagttatcctcatgctgtctttattgggtcttgtttggaaagctaagtctcctctgtcagaataaaggtttttcttttaagattttggagttatcgttttggtcaaatgaatgacttatggtgacctgggattctattttgtgatatccagtgttttaaacctttgatatttggcaaactttccaaaatcaaattataaattatgtctctttctggcctaatcttttagatattaggtcctctaaagtccaaaaatgacatttggcgtattttgcataaaaatcatacaggaaacattgtcaaatatgaaatggtgtttggctttttgggggctatatttgtgtaaatatatgattgacatatgttctgagattatgtaaaactcctataattctaatatgacttagtatatgttatcagtaataattgtaattatgttaaatggctatgtgccacagaggtaacaaatttccttgtcgattgtgtctttaactctggctactctacaatgtttgtgtcgtccacaggcaattgttgtctcatttttgtcctcttaaaagatggttttataggccgggcatggtggctcatgcctgtaatcccagcacgttaggaggccgaggtgggcagatcacctgaggtcgggagttcaagaccagcctgaccaacatggagaaaccccatctctactaaaaatacaaaatcattcctgtaatcccagctactcgggagaccgaggcaggagaatcgcttgaacctaggaggcggaggttgcggtgagccaagatcatgccattgcactccagcctgggcaacaagagagaaactctgtctcaaaaaaaaatggttttaataccagctgtaaaatgtaacaggtggtcttaaatgcaggtttctgattaataactctggagattgtgacgttagaatagaaggaaaactttcaaatagaagagtgaatggtgtttggttttctttggactgtatttgtataaatatgttattagtgtgtgttccaaaaattatgggaaacttctataattctgatatgatttcactattaataattataattgttatgtaaaattgttgtgtgccacggaagtaaccaaaattcctagtcaattgtagctttaataatggctgtagacttttgtcatccacagacattttatcttgctttggtccttttcaaaaggcagtttataatcggatataatactctgagtgcaggtcttagataactttaaaaattatgctcttggaatagagggaaaaaacatctaaatgtggcaaactgatgtgttaaacattgctaatccttttgttttcagagtcaacataacttatttctttagagctatttgccacttttaccgagtgagtaaaatacactcagtgacaaattttggagcaaatttgtttctctctacctgatttctctagaatttggaaaccatttgtgagtattctcaatttatgacagtatagttaattgcatacgtgcaataagaatctgttttcttttgtaacaggacaccattggagaaattggtcattttaccaaggctttgactggaatggcatgcttcctttaaagaatcaaagttgacttatagagccatttaaagcccgttggggaatctggcctcataccttgtccacacagagtccctgtacaaggttcctgacctgtggtaagtaaagaatgtcactttctaacaggcccaggaaccccaagttatcttgggacctcaagaggagaggactttggtcaactcataggtatttgagggtacaaacccatggctgggctcggctttcaaaaagtcttatctgagattcttcatggaacagagttccatcaaagccaatttaaaaagcctaagtgaaaaataattattcttgctgcacttcatgcaaataatcaggccaagtacagtaagactaaaatgcattttataagcaaatcatttctatcatgatttgtttttaataaaaatggggactgaacagagaaatattatgcttcaaaagaaaatctatagtaaactattagctattcttgaggttaattcttcagtttagactaaattctaaattgtttgtgggttagaagttcccaaactaatgatttcaaatgtttgcttttaaaattgggaattgtacttctcatcctaggactcattataccttatagtaggctattcacataaacactgtagtaaaactatagatgagagtaataatgtttctgccacgcaagccttggaagcccaattaggcctgcatgaatccactcaaacagttgcaaagcagttccactcttctcaccttggagttcgttcccattcccgctacttcccccatcagcaggaagaagccagagcgatcgacggccttttcccatctttatagcctataccttagggttaaagtgttagaaaacccaaaggaagggattgaaaccacctttgcaaaattaggtctgagacagtgaaaacaatctaacttaactgactccatcttgcttctaacctccaagctgtcttcgttcattcctgggcataggctgaactaactttgggagaaacttagtttacagtttaaagatggtaacagccctttcccagagcaaaattccttcttgcctgggacttgcgtttgtaggactaacatcagccacagtgttagaaattatggtttaggagtcatgcagctggaggcaacaagattctgacccccaccaaactgctcctaagatcagtgcttgagatattttgcagaccctgcacttgatggatcagctggcaccacccagatcaataaactggctcatctgatcttgtggcctccacccaggaactgactcagcgcaagaagacagctccgactccctgtgatttcatctctgaccagtcagcactcctggctcactggcttccccccacccaccaagttatccttaaaaactctgctccccgaatgcttggggagactgatttgagtaataataaaacttcggtctcccgcacagctggctctgagggagttactctttctctattgcaattcccctgtcttgatgaatcggctctgtccaggcagcaggcgagttgaacctcttgggcggtcacagttttgacctagtaaagctttcattttcttgctttgccctatggcctaatttataatatacataaccaaaagccttagcttctagtaaatagtatttattaaagtgctatataaacgttacattttagggtaaccaacttttcttgttttatttttgtttgtttttgtttttcaggaatttctcagttttaaaatttaaagtcccatatcccacaaacctgcttagcccccaggcacaccagacactcgatcaccctaaagttctagtttattttgggatccttgcatcccttaaaattacatacaagatgttgggtatacatacatactgcaattgccatcaggttcaccttgcccactctctagacagagttgatttatcaagacagggaaattgcaatagagaaagagtaattcatgcagagcaggctgtatgggagactggagttttattattactcaaatcagtctccctgagcatttggggaccagggtttttaaggacaatttggtgggtggggagcagccagtggtcagaagtaatgattggttggatcagagatgaaatcatagggagtcaaagctgtcttgccctgagtcagttcctgagtggggggtcataggatgagatgagccagtttattgatctgtgtggtaccagttgatccatcgagtgcagggtctgcaaaacgtctcaagcactgatcttaggctttacaatggtgactttatgcccaggagcaatttggggagaagcagtatcttgtagtctctagctgcatgactactaaaccgtaatttctaatcttttggctattttgttagtcctacaaaggcagtctagtccccaggcaagaaggaggttggttttggggaagggttgtcattgcctttgttttaaaccataagctataaactaagttcctcccaaagttatttcagcttacccccaggaatgagcaaggacagcctggggcttagatgcaagagggagttggttacatcagatctctttcactatttcagttataattttgcaatggtggtttcaatacctgaatgcattttcgtaagacaaagcttcaatgccaaaacatctaagatatcccaatacggtattaattcatttgctcggtattaattcatttgctgttgctataaaacagaatacctgaaactaggttacttatttcaaaaaggaacttatttcttacagttatggaggctcagaatgtatctgcacaataggttcttctttcctgctgcccaggtagagctgatttatcaagacaagggaattgcaatggagagttttatacatgtacagccaccagctaagcagaagatcagagttttactattactcaaatcagtctcctcaagaagtctgaggctagggttttcaagatcggtttggggaaaggcatgtggaaagctacgcaataggtgcttgctgctgactggtagggattgcaatcataggactgtgggcaagggtcctcctgtgcactgagtctcttctgggcggggccacaggagcagttggcaggtgcaggtggagccatcagtcatcagacatgaaatatatctgaacagatatctcaaaaggccaatcttaagttctacaatagtgatgttgtctgcaagagtagttggggaagtcgcgtgtcttgtgacctctggaataatggctggcaatcctgtatgtctacaccgcagcagaatttagtttcccctatcctcctagcctggtggtctctcattagctctacaaacgcggttgagttttggggaagggctattgtcatttaaactataaatgtctcccaaagttagcttggcataagcccaggaataattaagagcagcttgaaggctaaaggcaagagaggagttggctagattagatccctttcacttccatcattttctcaccgttataatttttgcaaagaccatttcaagaagtcccaggtcaaaaggacacatctggtgagggccttcttgctggtgggaactctctacagggtcccaatggcctggggcatcacatggcaggagggctgtgtatgctaacttgctagctcaggtctctcttcttatcaagccaccagtgccattcccatgataatgcattaatccattaactcattaatccattagggcagaactttcatgatccaagtgcctcttaaaggcctcccctctcaatactgccacactgggggttaaattttggaggggataaatagtgaaaccatagcaaccactgaatcaaaggagttaaatgctatttttaaaaatgatgctaaaagacaaaaaaaaaaaatatagtgttaaaagaaaaacttgagccaaattaaagttaaaggagtttaattgagcaatgaacgatttgcgaatcaggcagccctcagaattacagcagattcagagagactccaggggtgccttgtggtcagaataaatttatagacaaaaaaaagtaaagtgacatgtagaaatcggaagtgagatgcagaaacagctggattggttacagctcgctgtttgccttatttgaacacagtttgaacaatcagcagtgtataactggctgaagaatggcggctgggattggccaagactgagtgattgtcacaggcccatactcctaagttagtttttcaatcttgtctacctattgagataggttgtagttcatccacagggactcaaatatagaagtacggagtccttctcaggccgtatttagtttgctttaacaatagactttatgggaaaatggtattttgttaaatgcaaaataataagttagagaaacactttagtgtttataatttttaatattgactgttagccttagctgtttatttatttatttatttatttatttatttatttatttatttgagacagagttttgctctcgttgtccaggatggagtgcggtgatgcgatctcggctcactgcaacctccgcctgccaggttcaagtgattctcctgcctcagcctctcgagtagctaggattacgggcacccgccaccaagcccggctaattttttgtgtttttagtagagacggggtttcaccacattggccaggctggtctcgaactcctgacctcaggtgacccacccacctcagcctcccaaagtgctgggattacaggcatgagccaccacgcccacctgccttagctgtttaatatgtaactcatggcttggtatagttcctgagatttggagaggcaaactgaggtttgaatcctgtcttcaaacttattggcagttgggcctgatcaagttgcttaacatttttgtgactcattctccttacatacaaagtggagaaattttgcctatttttaaatagaattgtacaggacagagaaaaatgtattttaagcctcttagtgctttgtgatatatagcaggcaatatttaaatggtaactattattattgataatagtaagtatgtatttatgtgcttcacagttttacaattaaacatgtccctctcagggtttcttactatattcttacctagagctgtgacatattaaaccaccttgcaccaaaactgaacaattggtatactgaggataaacattacttttttattcagtagatatcactggataattttgttataaatctctgacagtaaagtgaaagattatgtatatcagttaaaactgataaataacattaaaaagaaatttctgaattgaacatcttttgctctaaattttctggccaaatagggatacctcaaaggaaaatggccggtgaatttgtatacagataattaaatagtagttttagtcagtaaatcaggaggtccaaataataagtagaaccagggacatagcatgatggaaattatgctgcccagttttcaaaaacattgatggtaataaacagctgtgtaacataaaagctggtatgagaacttggtcaaattctttttacctgagttgagaaaaggtatcatctccccatattctactccaaactgatgaaatgctcaccgagctgctccgtagcctggctggttacctcactgaaatttcacccttggaggccttatgaccttttaacttattccacagctagattccaccattatccaaatcaatggtgcatttacaggtgattcagaagttatttagagaagattctgacatgttcaataaaaattccaaatttctcaggaattacttttagacatctctaaatgaataacagagaggttatgtgaaatccttgtgtaattatctgtgcccagatttttttgtcgttgtttgtttttggtttttgaaacagagtttcactcttatcgcccaggctggagtgcagtggtgcgatcgtggctcactgcaacctccatctcccaggttcaaatgattctcctacctcagcctcccgagtagctaggattacaggtgcctgcgaccacacctggctaatttttgtatttttagtagagaaggggtttcactatgctgaccaggctagtcttaaactcctgacctcaggtgatccgcctgccttggcctcccaaagtgctgggattacaggcgtgagccaccgcgctgggcctgtgaccagatttcttaaccatcacatgcctttggacttgccattcaatgttccatttagtagattttgatacattgaaaaatcactatgaacacattttcaagtctagctggcttcatttttgtcctctaaatggcactaaatagaatctgtgattgtgacagtgcctttgctttaatctaccagctatttttgaaagatatataacttaattgaaaaatagtacaatcttttcacttagaatctttacgaaaaatgtaaaagatgctttgccagtctgaatagttaattgagtttgactgtaccgggtaagatgcaaaagagtgtgtctatggcaactctttatctcataaaaaatttaaagggcctttatttaatgtgactccttttaaaattcatttaatggcgtaagtaaaactggatatataattagagtctaagataaaagcataataattgaaataagataatatgaagaagctcacacaacaatgattgggcttcaaatgaatatattctttaagctcagctgaactcttgtaagttgtattttttcactatgatgtaataataatggtatgtggatgacaattatactactttataaatgtaaggtgtcttatagtgtactaggatctttcctatgcattatcaaatctgaatctccaattagccctggatatttgtatatccttttttttttttttttttttaatcaggacagagtctcactctgttgcccaggctggagtgaagtggcgtgatctcagctcactgcaaccactgcctcccagatagctgggactacaggcatgtgccaccacacttggctaatttttgtatttttagtggaaacggggtttcaccatgttggccaggcttgttttgaactcctggcctcaagtcatctgccacctcggcctcccaaagtgctgggattacaggtgtgagccaccaagtccggcctgtatgtccattttttagaaaaggaaactgagcacaaagaggttgagtaacttgttcaagatcacataattagtaagtgataaagtcacactcaaacccaggtattctaacttcaagtataatgttcttttctctgtgttccttctttgtataatagagagcaatgagtatgtaggaagggcagaatagctgcacagatctttacaatatgtctcacaataatgctgtgctttcaaaagacttgatttaatcattttgtttcctcattcactggtctattcattcaggctaagggggcccttttttctagatagatttgctttcaccatttcattcccttgtcaatattcgccatcttagaataattgtgttttcattctcccgcttgaaaaaagatgcttaggtaattctttatttaagaagtaaagaaacattatcaatattgatatagatatgaacatatatatatatatatatatatatatatatatatatagagagagagagagagagagagagagagagagagatggatagatacagatatagatacctcaaatccaggaagaaggaactagattttttaattatacaaaaataaaatactcttttttaatttttttcttttaccttttgtgttctttacataagatcaaatgaataaatacatttatttaataaggaagcttattggtagttcctgtagtatttactgtctattaagcatcaacctaggaattgtaccataacttttgtttaaatacaattcttctattgatgcagtaagagctgtcagtcatagtgctgggaatgccagaggggaagtcatccctgacaacattttttattgcactattaatacgtacaagttgacgttcaagtgtgtgtatgtatgtgtgcgtgtacataggcacacagaaacatcatatatacatgtgactacgtaaaaaaatacacttaaacatatctgtttactctgtaagtgaataatcatttatttcaatgtttagatgagattttaacatattagaatggcttcatttttctttctaggcaatctgctagcaggctttttccagcaacctattcttcccccatctttttgatattataccaagatttctgcctccatttttgttgatgtaattatcccggcataattttgaaaaaagatttcctggcaatgtaaatccacaagattgttgatatggcttgagctcaaatgatgcttctatccgatttgtttacctttcagcttgagcagagttcttgtttcataagaaaaacaggaagagatactatagtagagaaggacttttatggatggttttattttaagtaaatattgcctgtaagggatccaggaattttagtgtttttcttggattccttaaccataatacttagcccagagcaaaactttctctcaaatgatggtaaaaaatctaattctattaaatcctgattattctgtgagctaccttggaatacattgcctatgagtttttctgctaagaaatggacttcgtttattgctcattttcccaaaatcaaggaatgctgttgttcttcaatttagatagatgttgacaaggtcctcttcatagcagcaggtgttaggctataattgctcattatagaattatgttttgcttgaaggaactcaggaaacaagaaaagcatgttttctgtgtatatgaattctggttgaaaaattgaaagaatgacactaggaatagtatgtaaattggcagaatttgtcatttcattgtgcaactagtattttaaaaggcaataaatcaacgtgaacatccttgggaaatcagtctccttcttaggcctaacttgcaaagtacccccttaccattgtatttttttaagatagaaattgagattagagcaacacggggagcaaaatattggcagatgaacttgttgaaggagatgaaaaacaagaagctatagaaatagattggccaatagtgctgagcaactactcaactgcaaaaatggcttgcttttccaagcaatgtgtaaagcaattagcaccaacgtttttattagtttacataaaataatattactttgtaaacacctataaacagagattacctagatagcctaagactattattaagtacaataaaacgttactggtttaaagtaataggtatagaactttgtattgtatggtgcacattcacataactagagaggaaatggaggtctacaagtcaaggttgaattacacacttgtaatccatccttaagggaaaaagcttcactgatcaagatggtactttgcacaaccttgccaattgtttcacaaagctgtaatgatgccacaaataatctttcacctcccatacctaagtaaaccatatttgagttattttctctgctccttcctatacctttcctctttggcatcacaaagtcagatttttaacctacaggttgacataagccaaaaatgttggaagattataaactgcctctctttctctcactgtatgtgttgtgtatatgtgtgtgtacacatatataagcacacacatagatagaactcacacggaaacataagcacatatctacgcactgttgttttgctaccatatccagtgataacgtttattttgaattacatgtattttttttctgaatttaagagtgaaatgaaatagagttttgttagatatacagttattacctatataaaaatgattctgtgcatacttccttggcaaagtacaatacctcctccgctgtcactgccaatgcacaggtgttctttctcctggctgttagactcactgggagaacttagaaaaatatttcagccacagctttactctagcctagatcaattaatcactaccttggccttacaatctactaggcagtccttcccaaactctagaatacagcagaatcccctagaatgcttattaaaaatgcagattctaaagccccattctaaatgatattcttctggtaggtctttacaagtcatgtattcctggggtctttctttgagaaacacaactctaaaaggtctttgttattcccattctgggttttgaattctttctcgaaattgtaacaaaatatatgtactgaaatactgttcctctaacaatctgaagaaattttcagcactagcagcacttgttggcactattgttgttattttgtttaatatttaagacaactaaaagttacagtaatttataatgagaatcagtattatggaatcaaccattaacagttcatctcactaaagaatttttatttttattatttatttatttacttacttatttttgagacagagtctggctctgtcgcccaggctggagtgcagtggtgtgatctcggctcactgcaacctccacctctcgggttcaagcgattctcttgcctcagcttcccaagtagctgggattacagctgcccgtcaccacacccggataatttttttttgtatttttagtagagatgggatttcaccatgttggccaggctagtctggaactcctgatctcaggtgatccacccgccttggcctcccaaagtgctgggattacaggcgtgagccaccgctcctggcctcgctaaagaattaacatcatatgttcactagtactgaggttagttcccaaacactgcactaaaaaaatgaatgaaacaaatgaatgaaaatgtgtttccttagccatattctaagaaaatcacctctttgattattgtaattggaaccatctcttctttctttgcctggaatctttgtaacaaggttatcttctttcatgtcccattccaattagtaatcatttatttctattaaggcttttataatcattcggagaatccacactctttgtgtctgcagtcgctgagttcactcattaaatacagaattttcaacaaccctatttccatcttcattgttattaatacttcaaatttgcttctgttcagaaccacgcacttgtaggatcgagtaggtatacgtgttatccgtacacactctgaaaaactccctgcagacacttactgaacaggaattgcttatttaactgtgttttctgtctctttcatacatgttctctctctactgaagtgattgaaggatgacaaaggtccttatgggtgtttgatggcctgtgaatagctgtcggtctacgaattccctgaaaataatttctccacttgtatgaaaataatttactccgtgacttttcatgttgtattgtcaatcttccttctggttgtatcaggcaggagtcattgttttacatttcattctttagggggcctatgcttggatttctcccattgagaaaaaacaaagcataactctgacataatcgttggtgttaatatcatgaaaacctggaaaaactaaaggcaaggcaaaaaatatgcattcttatgcatgctttatgtgcactatgcccgtacataaacctggcagaactttaggcagaattaaaggtttaaatgggcatcatctatcctctataggccttttagtgtgcttcttatgtcctgaggaccataagaagatctaggagctgagtcctacctaccccacattgctggtaccgttgggggctctatgccattctactccagccagcttcctaagattagtctattacttttgtttcctttttttcttttctttttccttccttccttcctttttttttttttttttgacagagtctcactgttttgtccaggctggagtgcagtggtgtgatctcgtctcactgcaacctctgcctcccaggttcaagcgattctcatgcctcaccctcctgagtagctgggattacaggcgcgcaccaccaggcctggctaatttttattttagtagagacgcggtttcatcacattggccaggttggttttgaactcctgacctcaagtgatctgcccgcctcggcctcccaaagtgctaggattataggcatgagccactgcacctggccttattactctcgtttcctagacattattccacccttcctaatacttagctacctacttttgcttccgtttaaccctctgtaacttgttttaaggtggttttttttttttttaaatcctttggctatgtatgttcttataaagcaaaatttagttgtgtcaattcatgaaatcatattagcattcacttagaggagagtgagaaatgtttcctgctcatctatatagcattgcccatttgcacttagttttgatatttgaggcaaatccttcggttttattgtctaaacacacagttgtaattctaaggaattttacaccaggtcgaaggaggtagcattgcccttgcatactattatgtagggcattgtaatatgacatctgtcatatagtgagatgaggatggctacctctttcacttaaaatagctctggccctttatataaccaaagaaaatataactgaaatgcttggcaagaagtaaagttatgaacaatgggcttccagcatttgctgtatgcctgctggcataggaattccaagcatataatgggtgttctttatataatgaaaagccaattgtgagaccggcttataatctttggtgccagtaggcagcatgtacatttcataatttcatcctaatgttttaagtgatacaaaaatgtcctttttatctactaaagtgcttcacatgttaataaatacatgtaaatttctgtaaagtgatattgtcccttaatgaatcaaactgataattgtttctatctcattaaaagtaatctatatttgaaagtgaagaactctacaaataaaaatatttaacatatcaaacatttgaaatttctaggtattgtaagcacaaatatttatggtcatatttggccagaatgttttccttgtaaatagacttggaatttttatatccactattgtgattggctgtaataatttttcaagtactgtatacacaaaattataattacattttatactaactatgggtgggggctgtcaagtgtaggtaaacaccaatttgcctcatcatctcttttgtaaaacctccaaccaccaaacctaatcgagcaagtttatgcctcctctactgcatgttagcactttttccatgttaatgtaatatttgtacacaaacctgtatcatccaacagagcttctgagaagtagagacctttgcttattagactttcagttcttacttcgtagaatggtggttggccattccatacattttattttattttattttattattatttttttctgagatgaagtctctctctgaccccgaggctgaagtgcagtggcgcgatcttggctcactgcaacctccgcctctgaagttcaagcaattctcccacctcagtctcccaagtagctgggactacaggcacttgccaccatgcccggctaatttttgtgtttttagtagagatggggttttgccatgttggccagactggtcttgaactcctgacttcaggtgatccacccacctcagcctcccaaagtgttgggattacaggcatgagccaccgcgtctggccatcaatgcattttaaataaatgaactaaataatgaatatcatttaagtgcaattctgtttacatttgtttacatctatacttattttaatcaagtatattcggtggtgtcaacaatctgtagcttaacaattttaattgaaagactctaattacatatcactatataatagttaaatagttttcttggatgaaacaaaagagagtgagatagagaaagaagtaacaattaaaggatttcattatgtgatagtcttcctgtgtttttttttccttttagaaagttgccgcaataatagaaaatgtttatttctttttcttactagtagaggtggcatttttgctatagagtgagtgcccttagttcttcatttattaacaaatatttcattctatgtataaaaagtataataaaatcatatagacaatgttacatgaaaaatgaacggattgttattacaccaggaaatcactactgtgccctatcaaaatgagtttgaagtatatatgtgcatatatatgtatatatgggcatgaatctaaggcaatcaattatgtctattttcaatgctctgtgaagaaagaaattggttgcctactgtcacattttatcttagtgatactctttcattaaaatgcacacacgaaaaaattaaaaatgtaaaatctgattttctaagtggacttaggaaggtacagggaacaagtgctagtgcgtgaagtggaaagtatgagagtacatgaagttgaaaatgtgtttgtgtgtgtgtgtattgtagcaggtcatctaggactgcaattttcaaccatatgcccaagccccggcatagagatagtgattcagttggtctggggtggggtatgggcttaggtaatattttatggctctctaggtggttctgatgtgtagtaggggcaaagaactgcctctatgggtgtctaggactgtactgtaactatcagcaattagtgagagggttctttgtaatgcctttgattattcttctagagacatatgttctgtacatcagccggggagcaaaaccagggaattccagaagtggttctcccttaagacttactctgacggtgttagtgttttcataactcgagccttaccctcattctaggaaaaattataattattatctatcttactttccaccctcagtacttaacattttaagggatttagtgaatttttccacttccctttttatatttgttgcaggtaagtcctgttgaatatcatcctcaaatacatgcatattttactgccatggtaacattttctactttttcttctatttttttcatatgtaaattatcattgaaaatttggcagagtctctggtaaccaaagtaatcttgtctgtttctgtgctactagttttattataatttgattcctgttccaaaaatgaagtacagtaataataattttttaaaactcaaattatttgtaggtcaatattaatgactttttattaatgtatatgtatataggtttaacaataagtgaagcagcttataacagtatatattctattaagtagaaatttacacataaagttagaagaactccatgtgcagtgtcctcttatgctcatatataactttctgtttcaaataagagtttcaaaactagagtctgtgtggcacagatggtgaattgatgccataatttccaatctgcttgttagtagagatatgtcatatgtttattgatgattgcaagtatgtttggtgcattaaagcttcatatttagtattataaaaaacttaatgtcatgtggggaaagaagttgctacctttctaaaaattgtagaatagccaggctcaatggcgcacgcctgttatcccagcactttgggaggccgaggcgggtggatcaccggaggccaggagttcaagaccagcctggccaacgtggtgaaaccccatctctactaaaaatacaaaaaccagccaggcgtagtggcgcacgcctgtgatcccagctactcgggaggctgaggcaggagaattgcttgaactcgggaggtggaggttgcagtgagccaagatcacaccactgcactccagcctgggcaacagaacgagactccatctttcaaaaataaatagataaataaataaaaacaaaaattgtagaataaactccttgaattccaggaagaaacaaatattgttgtccagttatgcaattatgcataatgagagttaaatgcacaaagtgatcttaaatgtacatattcaaaaatagaggttggatcaagaattcagattattcaatatcaattcaattccttctgttgtgccatttgaatcctattgccaaagatgattattcatcttgaaaaacagactcccaaattcagagttcctgcattttaatttgcccttatgaaaggaaggattctttccttttctggaatacaatcaacttctgctgagaagaaggaaagtctttattcaatactgaaaatgtgtattttcttaccgtctatttatatggacaataatcaaacttttaattatcttctcacaatacttacagatctatgagaagagttgctatctaaagctggatctttatggagaagagacatgctcaagtgtagcgaataatttttgttacatatcagtattaactaagctttgcaaagtgaatagggaaacttatatttaaaatgtcagggaaaaaaagagttttaagtaaaagggacacctggaactctaaagagactatagctctaaacctgtagctgaattctgccttagatttcgttgacccttaactaggggcaaatgcacaccccattctcagggtttcccacacacctctggaaggaacacaggagcgtatttacagctatcgtctaaccattatagaattcctggggacaaagttgtgtcagccacctttgatttgtagtaaacaggtacaaaaccgcatcatggaattatttctgcttatataatcctcttctgcagtgtctgaatcttggcacctcctctccttcctcctaaccactgcaaaaacaacacccagattaaggcatcggggagaactgaatatctgaatatcaagtactccatatatattgatccatcgaatatgcctacaatatcactactaacctacaagtgtaccaggagttacacctgcagtataacagattaaaacagccttctccaaagctcatcactttgaatgttaaaagattcattttccaccacttaaaatctgcatactatgatctgtgtataaaaagctaaaagatatatccaatttcaaatgtaatgtcatgcaagtgtctactgaatgtgtatatatctttgtaagtgtccctgagcaaaataactttcaacttaacattctttttctcttggatataaaagagaataacgtaacaagagcaaatttgcttttaaatttctgccttgatagcaagttaaagtatttagaaccaacatcctcttaaatgtataatttatataacggatgagtctagaacagcatttccaaatggaaattgtaaagaacattgatcccgtaagatgttgaatgaaaaacaaattgttaaaatgtgataatttcatttccttctttagcgagtcacaactcaaccctgaaatgttttgtagttaaaaaaattgtttaacttagtttaacccaatgtttctgaacctacgtcacaaaggaaatgtttttgtcaagtgatacataactttcaaagagattggatttttttttttttttttttgaaatgaagtttcactcttattgcccaggctggaatgcagtggcatgatcttggctcactgcaacctctgcctcccaggttcaagcgattctcctgcttcagcctcccggttagctgggattacaagtgcatgccaccacgcccggctaattttttttgtatttttagtagagaaaggggtttcactatgttggtcaggctggtctcgaactctagacctcaggtgatccacctgcctctgcctcctaaagtgcagcgattacaggcgtgagccaccacgcctggtcgagactggaattttttgaaacacattttcataaatgaattactggggtactctctgtttattaactatgttagtactgacaaagattatttgctcggccaaaatttattcaggcttcccaaccttctcatagcccagtctgtgcacattctcctaaaatttagttttagcaggccagatcagtttagccagaaaacactcatccttggtatttgattatcctggatatctgatcatgttcctcatcatccaccatcctccaggggatgactggactattttcagcaggagtctcccttacccatgatgcttcctcttaataattttccatccactgacccctaccctgttccttggttataaaattcccatttgcctgtgctgtattcaaattgagctcaatctctctcccctactgcaagaccctattttcacggtccctatacctattgagatggtcttgaataaagcctgccttaccgtgattcagcaagtgacattgaataattttttctttaacagtataaggatcgcacattaccatttgttttgaaagatggtataaaaagactaactgaaaactaatcttggctgggtatcactggcagaaattcttggtcttcaatctatgtagaacagatatttgcattttcttttgaaaatttaatacattgattaaattgtcattttgttataaaaatatgaaatgaagggtacatatgatttttaaaaatttctgtccaccatcaccaaccactatgtgaaaatacacctttgtaagactttttctattctataacataccttcaaaaccaagaagaagtatttgtaggaaattcattgcttttatttgtgaattgataaagggaaaataataagctagggctcgagcttcagaacagggtgatggttttatatctctctcaaaagtactgcaaggtaggttgtttcaatactattaacaaccccagggttccctgacatcttctattcccagcttccattctcaaaaattatatcgaggccatgagttggactcctcagccctagcaaaagattattcatttgctctgtaacccttcttgaaccccttttcctggtagctgtgcccaataaatccgacttatatatctttgggagttggagagagagagagagagagagaaagaaagtgagacagagagagatagagggaaattattttagctaagaaaatttacagtcacaataatatgagagtctctgaataagggataaaagaatattagacgagacatagtctctgccaatggtgattaagtaaacatagtcaaggagaatatggctgtgaccattagtgtgtaagtggttacatctggtgggcaatctccagtcataagtaaaataatctacgagtgagatacaggctaagcaaagatttcataattaggaccgaacaagcactaagtacaaagtcaaacactgataaattgagcttcattaaaactaagaattctatctattataatacactaataacagtgaaaagaaaagtcatggactgggagaaaaatattcacaagacgtatatctgattagaaaacttgtatccataatatataataaactcatacatatcaataaaaagacaacccattttttaaaagttggcaaaatatttgaacaggcacttcataaaagaggacaaagatggtaaaaaacatttgaataggtgcctaacttcattagtaatcaaagaattttgaatacccctatatatgcatccgaatggttaaaatataataagacaatatcaagtattggggagaattggtgcctcagctggagctctcaaatattgctggtttaagtgtaaattaatatttgccaatatctactaaatctaaatttatgccttccttatgagccagcaattcctctcatatgtatgtgttcaaaagaaattagtaggccaggtgtagtggatcatgcctgtaatcccagcactttgggaggccaaagtgggagggtcacttgaagccaggagttttagactatcctgggcaacatagtttgacctcatctctacaaaaaaaaaaaataaaataataataatcaaaattagcctgacatggtggcatgcacctgtagtcccagctactccagaggctgagatgagagaatggcttgagcccaggaagttgaggctgcagggagccgtgattgcaccactacactcctgcctgggacagagtcagaccctgtctcaaaaaaggggagaaattaagtccaccaaaatagcatgcacaaggtagttaatagcaacattttgcataatagcagaacctgatataacttgtgtccctcagaattagaattaaaaatgcggtatagactgggcgaggtggctcacgcctgtaatcctagcactttgggaggcccaggagggcggatcacttgagatcaggagtcagagaccagcctggtcaacatagtgaaaccctgtctctactaaaaatacaaaaaattagccgtgtgtggtggcaggcgcctgtaatcccagctactcaggaggctaaggcaggagaatcgcttgaacccaggaggcagaggttgtagtgagctgagatcatgccactgcacttcagcctgggtgacagagcgagactttgtctcaaaaacaaaaacaaaaaacaaacaaaaaacaaaaattgggtatatccgtggaatattatatagtaataaaaacctgctacttggaagaatatgaacgaacttcataaacacaatgttgactagaagatgaacatttactgtgtgattccatctatatgaagtttgagaactggccaaagttatctataatgattcaggtcagcagagcagtttcttcctgagaggctggtgggaatatagtgtgaattgggaaagagcatgaaggagacttacagggtgctgcaattgttcagaactctttttccttgatacttgcttacagaaatgtgcagaatttttatttcacctagttttctatgcatgcgtagaatctccatagaacacacattttattaagtacgcattcaacttcttctaaaatacctctagtcatagaaaatgtaactttatttctttattccttactttgcctagcccaagctcctacaaaaaaaaagattagttaccatttaattcaaattataaaacagaaccagtcttttaaacagtatcggatacacaagtatctaatctaacttccattgcctatcagtggatgtggctttaatcaagtcttttctaaacaagatggacaggcactgaagaaaaaaaaagtgagccattttatgtgttttaaaatgataatgtgattttgaattttgctattgtagaagctcctaacaatattatctggcatttgttctatctgaataaagccatggcttatattatgtatatatggaatttcccagaatactattgttagacacatcactgagctgtgaaaaaaaaaatcatctctaatttgatcaatatgtacttacacgtatatcattagttgccattgctctcagcctttagtacattttttatgagccccgtgggccatgagcttgctttttcataacagagaacgagaaagaagaaatctcatcagtataataatacccacatcagtagagggcatggttcagaggcaatcttgttgtctgtcacagactccatgatataagctagaaatgataaagagattcgttacaggatactgtaaaagggatattatggtatataaactcattaagtgttaactagatcaaagcaaatatggcagaaaagagtctctgaatactgtagcagagtttattgaatgaatgaacgaacgaatgaatgaatgaatttataaaaagcgcaggggggccggggcgcggtggctcacacctgtaatcccagcactttgggaggctgaggcagacggatcatctgaggtcaggagttagagaccagcctggcaaacatggtaaaaccccgtctctactaaaaatacaaaaaattagccgggcatggtggcgcatgcctgtagtcccagctacttgggaggctgaggcaggagaatcgcttgaaccctggagacagtggttgcagtgagccgagatcgtgccactacactccagcctgggcaaagagagcaaaactccgtctcgaaaagaaaagaaaaaagaaaagaaaaagaaaaaaaaaagagcgcaggggtcagataattgagttagaaggtagaggagtggggatgttaatgcccatgtgagaaaagaggaagaggtattgaaggaatccagcggactttgatgaggaccatgcgggactttctattttcaggaacctaagggaacatcttgctgtaggcagcctggggctgtctccatcaaagaaatgctaatatttacattcattggtttttgttatgtgactgtctatgtgctaaagctgtggttctcaaagtatgtttcagacccgcaatatcacctggaaatttgtaagaaatgtaaattctcgggctgtgcggagacctactagataatgaattctgggagaggtattataagaagttcttcaggggattttgatatagtctctaggttgagagacagtgtagtagacaatacattcattactttatttattcttctccatgattctataaaagagctattgttactgctttgtttacaaatgagaaaactgaggctttgaaagaggctcagtattttgttcaaggtcatatagctggtatccagagatactgggaatagaacccaaatttgtcagactataaaacacggtgctttcagccactcctccagagccagggggataaaaattcattaatttccatgagtatttgtaatagtagcccgcaagtcctggaatacaattataactgctacagcattacctttgaggagaaaatatctcatttccccaattgattgccaaaataaaatgcttaaaatacaaatgtctggttgaagaaaccctttaattttttttcttgcgttcaggcatttgtgtcaggtttaactaatttattttaacttgcaatacagtgttgcctgtagtaacaaataggacattctgctattagtttttaatctcctaccgacttgttattttccactcctgaagctaaacttctttaacaatttctatgctcattgtatctacttccttactcacgtagctacctcaaacaccaataatccggctgcttccacatccttcaactgaaattgattttgtcacggcccaagtcacatcaggcctcatcttaccactctgtagtattgattgttgatcggtccttcctattggaaaaactcttcttccctggcttctaagatattccactattctagttttcctgtctcagggcaactttatcattttcttggagggttgctctcctatcgtaaatctcttttaacgttgagcttcaatcttaatgctcaatcaacatatttttcttgatctcatcaaaatccatagcaataacaactcttaaccatgaccctcagatttttatatccaaccaaaatcattcttttgagctagagacctatccccctgcccatcagttatgctcatgtatgtcacatagttaattcaaaatcagtatatatgagatcaaaaactgccttctaagcaattcttcctccttctctagctcattgaaagacatcatgtgccaaacttctcaggtttgggggtatcattcttgcattctccctcgagatcactgttctaacattaccttggcatcagccatcatgttttgccaggattgttgcagttcccctaaaacagatgttcaatttcccccacccctgtgattcagttttccacatgcagccagaatgttttaaaaagcatattcgattgtgtcatcttccccctagaaaaccttctgcggtttcttcaaaataaatttaactgaataactagttgacttaattcaatgttttccttcgtcacactaattaatcagtattttcatggtcctcgatgctgagggcttaacattcaagaataaatttgtcttatgtttactttaacttataaacttcctttaaatgaaaactaattgttaaatgatttgcaaaataaccagaggcacaaagtctattgtgatcagtggatatgacagaatatattttttgttgttataccatcactttcacaaaactatggaatatatatataggcatataggtgtgtatgtatatatatgtatagatatgtgtatagagacataatttatagaaacattcgtaataaacccctgccaaacatattttgcacgtttgaaatattagttgattggatttgtggtttgtatgtaagttgaacaattaactgatgtgatcattctgtttccatggctgttaccttagtttataccaccttttcacctgagtgattacaatagcctcctgattccttgtctctttatttgccacgttcccttcttcaaacttcccaaatccactttcccaattgttatcaaaaagagttttcctaaaatgtaagtcagataatgctactcattatgccaaattctcattgccccaaaagtgaaatctgaattctataagatgctctaccaatctctccattaattggcctctgcactatctctttacattcaccccttcccacccaccgaacccacccatccctcaagaacgacattgtacgtactaatcatgtcatacaagtcactattctagcttctgttattcttctggaaatgtcatctcccacctcaactttttacccagctaactccagtttatcatttaggtgatgtctcctttttggaacatacctagaattgacgttacaggaggaatatctcttgtgtgtcatctcaacatcccacagtaactatttttttttctttttgttttctttctttcttttctttttttgagatggagtcttgctctgtcacccaggctggagtgcagtggtgtgatctcggctcactgcaacctccgcctcccgagttcaagcgattcttctgtctcagcctcccgagtagctgggactacaggtgcgtgccaccatgcccggctaatttttgtatttttttagtagagacggagtttcaccatattggccaggctggtctcgaactcctgacctcgtgatccgcccgcctcagcctcccaaagttatgggattacaggcatgagccaccgcgcccggcccacagtaactatgttttaacatacatcaaaccactttgcaatttcctgtttacatgtcattatccctcattagtaagcttctaaaaagtatgggcatttatccagttccctatcatctccctagtccccagcacaatgcctgacacttaagtaattacgtgagtaattaaatgagtaattatgacacattcaagcttgttaaactctaaaacttggaaataaggcaaaagaacaagtagatgttcttttattatcatactaaaaagtattgtctaaaagatctaccgacagatagtttaatttgttagggacatgcgtctttgtataacttagtactaacttaaaagataatttttttgtgggtacatagtaggtgcatataatttggaagcacatgagatattttgatacagacatacaatgcatagttatcacatcagaataaatggggcatctattaccttaagcatttatcctttgtgttacaaacaatccagttatactcttagttatttaaaaatgtacaagtaagttattattgactatagtcaccctatagtatttactattgattagggcttagattctgagaaattttacataaatgtacacatttttgttcagtagagagacaagtaatatctttctggcaccctcaaaatatataattttattgcactttttgatgttaatctgttttgtttctaacttagcaatcttgttctagcttctttttctttctgtgactatgtgtgttcagtcccttgaattcccctttgaatcagttttaatttgttgcctgttttgttattagttagttgaataaatgtttccatattatcaggatatgtttataagggaacagcaaatttacttccgtgtgttttaaactatatgagaaacactgagcttggcatcaatagctaattctaggggagaaaaaaagtcattctcgtatatatttggaaaaacagtttttattcctttttgagatattaacagccatttgtatgttgaagattctgagaaacttggaggtgatttaatctgttttgctttgtttaatctaaaatttcaagattattttggttctaggaaattttgctctagaaaaaacagtttggaaacattggtttacttatagctttaaagaacaatattttaaactacaattcttgtgttcgaaatgctgtaaaaatcatttctattaagatttatttcctctaagtgttttgcattcaaataaggtgaaattctgggtctccaaatatacatttcagaaaagtctttgtttagctgtagggaaggcatcctgacttctcatcattatagtcacatagatacactagatttaaaggatatttaggtcgggcgcggtgactcacacttgtaatcccagcactttgggaggccgaggcgggcagatcacctgaggtcaggagttcgagactggcctggccaacatggtaaaaccccgtctctactaaaaatacaaaaattagctgggcgtggtggcacttgcctgtagtcccaacttcttgggaggctgaggcaggagagttgcttgaacccaggaagcggaggttgcagtgagttgagatcgtgccactgaacttccagcctggggaacagagccggtctccgtctcaaaaaaaaaaaaaaaaaaatagagcgtaattatatattttccttattttaaaagggaaaaaatactttccttattttccatatagagtatatcaaaataattacaatcattaagtaaaactaacatttacctgtggtctaaaaaagtcggttgaggccaggcgcaggggctcactcctgtaatcccagcacttcgggagttagaggccagtggatcacttgaagacaggagtttgagaccagcctagccaacgtgatgaaaccccttctctactaaaaatacaacaattagccaggcgtggtggtgggtgcctctaatcccagctacttaggaggctgaggcagaagaatcgcttggacccaggaggaggaggttgcagtgagccgagattgaaacactgcactccagcctgggcgatagagggagattcagtctcaaaaaaaaaaaaaaaaagaaaagtcagttgagatagtgaagatccaaagatatctgctaaaaaagtgtgtgttatctagttttaaaaagaaatgatatgcaaataaaaacattagtgagcagttaaatatttaaagggtacgttacttacattatgggtgtaaagtgtaagtggatttctgaaaacatgagcaccatgtgaacttcagtatttaaacaagtttattgcttttggcttttggatttattgtttttttgaaaatgggtctgagaacggcctagaagaatgggtagacttgacatctaagtctatctcaattctgctcttgagaaaagaggaagaaattgctcagaatgttctatcataattttcttcttgctctttagatttctaaatggctacacaggtattgagaaacacatttttatcttgttatgaacactaaaattcattagccttatatttcctctttccttatagctgtgtcttgtttttgatggcttaacacttttccattctaatcaagctttgtcatgggctatgggctgaagtgccttgtgatggactgatttactttcagtccctgtaatctgtgcccttgaaggctagaggttgaaatcattaaggctctgctgttgcccttgatctctgctcaaagaggctagagattgattggttgacagtggttgacctggacgtctcaaaatgaagccgtgatgaaggaaaatcaagtacacacgttcagaatatttcataatgacatttattctgcgtgcattttttccagcggtatttttgcttctttttttaaaaaaaatctagtttaatcatttctagcccaccctcaccactaccacatgtttattccatttctacattctggggcacttaagaccttttaattccttgaattagtcatttataaatgttgtctgaatattctatcaaagcaaggcagcatagagaacttattattacacacttatcacatgaaaaaattatttattagcaaatatctattcagagcaaacattttgatcaaagttggcctcaattcactaattagttattatgcaaacataacaaacatccaatagaataaatattcactcttttctacagttttttttggaatggtttcagtgctggaaaaaaaaactaaaccaattcatgtaagaaaaagtaaatgtctgttaagagaaaagaccacttttaaatacacgttttaatatttctattttaatttctacttaaaaaggttaaggaggaatattctaaagacgaatatatttgcaaatactgtgggaacactttattgaaccaatttgagaactaagtcaattatattgaatttacatatttggttaaagaaaaaatgagaagtgattagattagttcaatatttaagtgaacttaacagaagtatccaagttcatgttgaccctattgcttcgtattaatattgataattacaaatatacatatatattaattttcaaaaatatagattatgagtgggtaataatagcttctaaaaattcactttggtactattccatagtggccaagtttccttttgttctctggagggaggtggcctaatttaggcaagtttagtatttagagcaaaaaaaaaggcagtctatgcagagattcaatggcatcttaaacctgccccacctatctctcattttttacattgctttttcattatcttttcctttcctttcgagagacttgaatttaatattgtctctcttttccccatgtttgccttttataaatctaagcatttctgccattaatactgtaggttaagaaagtggcagccaccatatttaaggaatagtaaaatctgtaactggggaaatatacagtcttctgagaaactgaaataaatttcaggtaaaaagtatgtgacgtcaattgagtggtgcacgtcgagggatacaaacctaaatacattccaggatgaaaatcgtgataagtttggagctccattttcagggaagtttctgtactgactttagaaacattgcaaccaaacaaatccttgggaactgtagaaaggactctttttagtgttcaggctaagtagacaatgcctacatatttaaagtttcatttggcagacttgacacagtaggcttcatggaacacaagttatgccttccttggtctgagagagagaagactagttctgctcaactgaagttaagatctgaggttcagtgagtccatatagatatcatggaagattgagtgaatacactggccctaaagcaacagaaagagcacaagttgagatacagttttaatccccaatgattggaatcaccactgccagatatcacatcctaattacacattctgcccttcaagctctggcaatacttttcttgcggtgccccctttctttagtttgccatatgaagagtgtggtaattactttccctgcagttgtttaccagttctcattcatttttcaagttttcctttctctctctctccttttttttttttttttttttttttagatggggagtctcgctctgtcagccaggctggagtgcagtagcatgatctcggctcactgcaacctccacctcccgggttcaagcgattctcctgccctcagcctcccgaatagctaggactacaggtgcatgccaccatgcccagctaatttttcttgtatttttagtagagacgggatttcaccatgttgggcacgctggtcttgaactcctgacctcaggtgatccacccgcctcggcctcccaaagtgctgggattacaagtgtgagccaccgctcccagtcgaatttttctttctctaaacaattttcagtgtaaaggtctgctgtgctataaatttgtgacacatgattgtgttgtagttacgactacgtaaggctctatggacaggtttcctttagttctgccagcacagctaaccagctaatataaatataaagaaatgcaactgttgacaccaaatgcagtttccgtttgcctgaacaatcaacaaataaacacaaaatctgaataaacattacaatgtgaatctatgtgtctgtatccataattatataaaattgaattattctaaagaattctatgtttcttaacaaaaatattatatgcatatatacagttaggtttaatagatttgtataagcatttctaattcttagcttccattgatcttcagtgtttcagaatatttatttcaaatcacttttggaagaaagtaagtttacaaattgtgaaaataatacacaaatcagagatccctatttaaaactaatccctacatcgcttcatcaaaatgcctaaaattcttttttggaatgaaattcacagagaattgcaagattcatttcctttacacttttattcactgccaataacttggggatactaagagtgcaggagaagcaggtaattctgagggcgttttggaggaaagcagttttgcattggctaagtttttaaaaaagattaaacatttaagtgccttgttttaaagatttgaatgataatgatttcaggtaattgatttttaagctatatggtaataataagacaaaaataattcatttgtttccttttggaaaatagattttttaaaagataaagatctgttttaatttttgtttttatttctaaggtactgtccaacctaaaaatatgaaagtaggtgtgcataagcttttttaaaaaaaaatcgccagtagtacaaacaaattttatagtccatcatttgcagggctggagggcttgccatatttaaatgtgtgacctgttttgagtatttgggtcaaagagaagggaggcaccagtgtttaaagtggcacaaacagagggaagaatgaaaatacaatcgaatatattcatttttattttcataaataaaagaaagtttaaaaaatctaggtacatcagtaatgttcccttagatagtattattatgtggctattgtttactctcctttgtcagcaacacgatcagtgattttcagcacctgctattgggttaataatggagttagagaagcatgagtttcaatttgtgctcatctactgcaaagtagctatatgaacttgggcagttacttaacctcgctaagctttgtttcctatccatacaatagggtcaagagaagtacctctcttacaaggtctgtgaaaatgaagtatgttcatgtgtttaaagtgtttagtaggtggcacatagtaagcactcaaattatatggactatggccattaccttgacaaactatattctctctccatttcctcatatgtaatgtggattaacacgaagattaaacttaaaaagtgcataaaaatctcagtgtctagcaatttgtagatgttcaacattattaaaattccctcctcaattttgcttactttgctgtactgaatgctatgtgagataggaaaggatatcaattatttgctatgccccttccgggcactaaataaatacatgtttttgttcattcttttactcaatctaaaagttattgagcaccaaataggcatcaggaagtatatggacaagtataggaaacaggattgatatttacaatcaggagaacaattttgagcccccagtcagtcacttgatgttatcctgggcaatcaatggatagagtccaaccactctaagcctcagttttcttatttctacatgttgatagtattaatagttgttataagatttgaaacctgttatggactatagtattttgtgcagacattagtcaaaatcataaattattttggggagcacatttacattcctcacagtgaagccttgggccctacacctttgcactaaattatacatctgtagcaggaaaaaaaaatttcagtatcacacaaatttaagtgggctaaaaatggtattttattaatttttctatagctaaattaaatttctattttggttcctcttttaatttaacaggtttcttaatataccattctcaggaaatcttaataaaattcagtgacttttcaggtctaccggtcacattcaggagttgttaggactctagcctccactctaggattggaataacacaggagtattacttagcttcatggcatcagggccaacttctgattctaggtcaaggacacacagagatgtgacatccaatgtggtctgtggggaagaagatctttgcatgcaggcattggctgaagtgaaccagtacctgcatcccgcccttagttgaactgcctattctgcctccaggatttggggtgtctgtgtcctgattaccacacccttgaaagactgccagcttgctcctcctaacttccatgaccttctcaagcaccgacacatgttagctgcttatcacaaacctgatgagatgctcagacccctgtgaggctaatctacatgcccagtccctttgctctggttgggcactatttttcagcagctccagaacctccttctcttctttaggactttggttccctaagaggacattataatgttcctcttatttgaaaaggtgtgtgtgtgtgtgtcagagggtcaggaccctccccacacccccacacggcttctagctctcacttatctgtaactctctcaacttccccctcttcttctcttggtaggcacctagagcaggtaaaaacttttaaacaggattcttctatatctgtttatgccagaatcatggttcacttacactaaaagcagttgacctctgtcagtgaaatcaagagttgattttgtaattcaagagctctgtatttataaacaaccctaaggcagtgaggaaacagtgcctaacttaccttacttgcaaaggatggaacttaagaatgtggttacaatctcacgaaatacttgtgtgtgtgtgtgtgtgtgtgtgtacgcacctgtgtgtgtgtagttctgaagatggcattgttaggtggtggaggcctataatattatgattctcaacatgtgaattgttatcacaggcaactaatcctattgcctcaggtttacaatctgtaaatgggaaataaaatgcctaatgtttgttctcagcctagttgtgaggattaaatgcaaaatacagcctcaacaaatgtgagttcccttcctcacattcccttgtaaaaaaaggactttccccaccccccttttatttagcatatcaacaattactcctttatttgggactgaacagccttttactaactatccttttgtttctcattttttatattcatgcatagtacaacttatgaaatattttaccccaaatcctcttgggtctgctttatatgcataaccaaataaggcatatttttatacaactattgtgttttatcttaaggtaaatttcaagctaaagtgaaaaatgaattccttctggtattcaggcagaattttccttacgagaagtaggtcaagaaacattgaacgcagaataaatttatctctgaatacggctcttcagctctggattgtttaaggatggcctagaatctacgctgagcattctcttgcatctcctttttcagtatggttctgaattagcactcgggcataaagcatttccttggaattgctcttatttttgtccccatattctgcactccatcgtcaggtaagaaggcaatatgtagcagtcatttaagaaaccagcacataaattatttccgaagttaaatcaatgtgcatcttactggttcagttcacagttaactagaactgctggggcttgcttttatgaattgtcccattccctccttgctttctttttgagactgactcttgctctgtcacccaggctggagtacagtggtgcgatctcagctcactgcaacctcctcctcccgggttcaagtgattctcctgcctaagcctccctagtagctgggattacaggcatgcaccaccacgcccggctaatttttgtatttttagtagagacggggtttcaccacgttggccaggctggtcttgaactcctgacctcaagtgatccacctgcctcggcttcccaaagtactgggattacaggcatgagccactgcgcctgggctctctcttttaaacaatcataaatatgaaattaaatgggctgactggaagcaaattggtctgtaggaacgcccatgaaagtgttccattctgattgttttcccatcctgcagcccctctggcctagtggaagctcctttcgttttgcagatttagattaactggggtaggtgagagagggcagggatggcaggccatttgtctctcatcaccgactgaaaagttgagcctaatatataccttttgctcctctacccaaatgaattacaaaattctaattccctcacacaccggggcctgttgtggggtggggggaggggggagggatagcattaggagatatacctaatgttaaatgacgagttaatgggtgcagcacaccaacatggcacatgtatacatatgtaataaacctgcacgttgtgcacatgtaccctaaaacctaaagtataataataaaaaaaagagttgattgtttttataatctaaaagtaaagacagtttggttttgtcaaaacttctttgttttctatttattttctctatagcttctaaatttgtgttctgcttgtgcatgcgtgtatgcttgcatgcatatgtgtgtgtgttttccttaaagagtaggcaaaaaagggcagaaaatagatcattcccttataaacctgacaagtacctgtttgtttctttcactgtggtaactggaaggctggaaatactgagcacttcagtagtcattctaaaaagattggttcatgtttaatttgtttgactgcccaaacctctaatggttcagtgaaaccttcgtgaggattttaagaaatagatcaggtgatagtttcagttgaagctactaaaaaaagcctttttgttcatattattttattagagtgggaaattgggaattctaaaatgttcccacatttgtcacccgtgttactctggcagccttttgtcatgttcacattttccctgttcgtttgttactgctgctgaatgtactttaatgattctaataggagctatagattgtgcagaagaataacaagcttcaaattaaaaaagaatatatttgcattttgtggcttctaaatattaatacaattgaattgtttttgttgaccactgtacattgacttcccagggtccggtgcatagcaaattcatagatgctccataaaataattatagaaccatgcattcgtgtgtgctgtgttgtggttctgggtactaaggatgtctgcctgagtcctgaatgagtcttaatctccatccaagttgtgtgtttcagagttgggatggtgcaaggaatttgattattaatgtaaactttagataactcatagcatgaataacaactgtacagtagaagaaaaatgcagaaagaataaaaaacacaaacaacagctaaaacaacaacacataaaaaacctcaaataattagagcaacaggctgtgaatgcatttagcaaacatatacccttcacttacttttgggaatccagtaactttctcctctgagttcaatgaaaaatcagtagcacttacgggtgtgatcattaactttgtttacttttttagctttcaatgacattcacgtttgtgttgagatttgttttttctttcctgaacattttatcccattcgccaatccagaaatgatagaataggaaaagaacaactagggctttatgcaagtacagtaaaatctattgatgcccctctacaaaaggctgcaaattggaatggctgaaatcatctgctcgtcttttgtgttgcattttaggactatcaatgaaacttgaaatgatatattaatagaaagtttgaacaggaattatatattgaaaatgtgacagaatgggtagatccaatcatcctaggctgttgagaagggaatatgcctcacagtcttgtactttttagatgaagccttccaatttacctggcagcccacctcatggctcagtgtttagtcatatagcagaggttgttacaattacaaaagttctcttttttttccatggaaaattgatcatttggagcagtagattaatttatttcaattttaaagtatgagaggcatagaggtacattaaaaagaacaaagactttgtagtcagagacatctaagagttgtgtaaacctgagcacataagtagcattttcttatctatatgatgggatggggttggggtaagaatatatatcatataggcagttacaaatataaaccacacatcacgtatggattttttttttagatgaactcatttatttgacatattaaattagacaaagaaatatatatgtaaccagataaaaacaatcacattctcatactacttgaacacaccgcagtggtcaaaaataatggattgtaaaatggaccccaggatttaatgcaaaaaccaccccatacgagaaaagtttcaggcttctaacttcactgaatccagtactaaacgtgcttctttatattcctcagcttcttccaagtctttttcactttctaatatctgttgaagatccaaatatgcggcttccaacctgcgctggcaatctgggatcatcatccgggattcttgtaggatctctgcctgctttttgatgtcataattttcaccatcttcagctctcattttttcaatcttttcttcttgttgttttgcctctttttcatacatcactttttatttgaccaaccgcttcaccacaccggtcttgatcttgatctgtctcacgcgaggatcggccatggtccctcgagccccgcgagaaggaggggcggaaagccggggtaaccgtggagggcgacgcgcagaggcggtagctatttaggcttggtcgccggcgcgcatgcgcaggctgcgcggccacttaaggagtttttataataaatcattatagtgtcataccttccatcaaaggattgagtactcaggtgtgaacattggtaaacaatttttccaatattaacatctgtagtattttaaattatgtgtcattttaaggtactgttattctctttgtaatttaacattttttataatagaaataattttgcaattgctacattaacattttgagttgattattgcttattgttagcaattccattgcatcattttacagattccatcactgtgctgaaacatcccatctgtttgtgaaagttttggatgttttctttagtatctagatgaatctattccttatcttatcagtcagagatattttaaagtccttgtctgttagttcaagcatataggttatctcttagtctggttatgttgatggctttacttcttgataatgggtgtattttgcttagttttatttattttttgcaagtctcattttctttttagtgaatgttagatgtcatgtatagaagaaaaatagagaatgaggtaaatatgtttaatcttggaaataggtatagctttttttctgtcatactgctagtatggggtttgagtcagtggtgttagtattgagctggtttggaggggcgggggttgttgttgctgtagcaaccttcagaacactacagtcttcaaagacctccactgatgggctgctgctatcccgtgcttaatgtaatagtgtctgcggtcctaaagggatttctatcttcttgttccatcctcagttttcagcaagccttatatgcctgtctctcccctagtggtaacagatcattctgtttttattggtgcagaatcctgggccaaagaggttatcatactgctcttccaaagagggtatcttgaccctctctcagtggcttctaccttccccaacccctctgaacaggcgggtcccatgggtggtagagtttagtatctttccttcagtttagtatctttccttaaatcttacgccttttagaagaggagggtctggaaaatgggtttgacttcatgtttgtgtgtcactgaggggagcttcttcctatctcttgtcctacgccttacttttttgcaagttcccaatagaagtttgtggaaaagaattccagaatgagtgcagactccttcggtctgcatttccaaggatgctgaaatgtcataccagcccacacctgacttttaagaatgccttacaattggagctattttctttttcctgctcctacgatgactacttcttcctccagttccctgccaaaggtaaacctttcatgtatccagtctctccttggaggagattgaagtactttggctcacctcgttgccttgtggccacagctatataaatggctcaaaaaataatacgtttttatagatcaccctgctttttctcattgggtggagcaacgttcttatatagcatttttacatcctaagcagaagaggaacttgattatgatggaaagcgtaagtattttaccctcttgggatatccacattcgacatgttaatcattacagttacccttactttagatggaaacaatgaataatacttatttttattagagaaaggccgtagtagataagtgatattttaaaaattgaatttaataaaaatgtattgaggacctgttatctgtgaatcacccaatgggaaaagtcatgaaaagctgaagaaaacacttcattgtatttcagagcttttaatttaaaggtgaagaaaaaaggtgactcaaaagcattttgtatattcagaatccatttgtgaaacctaatttgtgatgttgaaactgagatttggcacactgtccaaaattgcattcaaaagtgtagaacctgctgtcctggcctttttgttttgtttgtttgtttggtggggtggggtggggtgggcgtaggaaggaaaaagaaaagataaggagtgtggtattgactgatagtttattctcaagtgcagtcaccagggagttcgaactgacttctacttttgaagttgaaacatggaagcagggctccaaaattttgtatctcattgaagtaacttagaatactcacacttttatgaatgattgagatacttcctaaaaatttaaaccatgatatctccaacaacggaaaagagggaatatgaaacccccataggctacgggtgtcaatcaaaatagtcttcggagaaatgaaatgttttcttcatttactataaaattgaagaaaaaatttcatttttcttttttttcttttttgagacgaagcctcgctctgtcacccaggctggagtgcagtgacgcgatcttggctcactgcaacttctgcctcctgggttcatgcgattctcctgcctgagacttgcgagtagctgggattacaggtgcatgccaccatgcccggctaatttttgtgttttttagtagagacggggtttcgccatgttggccaagctggtctcgaactcctgacctcaagtgattcacccacctcagctcctagagtgctgggattacagatgtgagtcaccgtgcccagccaaaaggttcatttctcaagttttacaaaacttttcagtcaaaattcacatatctactgtcacataattcatactcaattacattccttcaaaaatgctctcacacaaagtttgaacacatcgaggcaggtggtttgaaacatccatcccaaagttgagctgggagtcaaggtgacaagaatggcccatgagcagtgagatgtctaccaatgccgggctccggggcaaacaactaacattaagtgcaaaggattaaacttgttaattaggagaaaataaaagcaggcatttgcttattttattattgagtttatattaatagtaatcacttccattcatattagatgcaaaggaacttttaatattctatgcactgacttaaacttatttcttaatccctttcatctccttataatgatgcatatgagattattggaggtttggaggtatgcactaatgcaaagtgatgagctgtaaccaaaaagtaaccaagaaaataaaatcacaatttcatgcatgtatttatatttgtcttctatggcaaaccatggggatattgaaatatgaaatttcaaataccctctttattatgttagatgcattatttttaacaatagaagccttaaataaaatattaagatacatttgtattttgacacttaactgcccttggcattgtgcatttaaacttttggtgtctagcaaagttaaagggagactgtctttaaatacatatatattgatagtgccattttgttagacatgtcatctttcgaatgtaatgatattgttcacacattgattttattgatgatgttaaatcaaaatggtttctgcaattagtaacttctataaaacaaacatattaaaaggaaatcatacttcctattgtagtataccaatttatttttccatttaggaatagctatgctccctctcatgttttgttttgtataccttactaaattaaatattcattttattctttaccagtttccatcacagacacaatcagtattatttaaatttcagcaagaaactaaacaagacttacaagtttttcagtgctaatgatttttttttctcattaagtctgagtctaatgaaactaaacagaaagttctggttggattccttggtcacccctatctgtgtttgtgaattcctataattggcatgaattgaaagttcttgttatcactgatagtaacccagagacaattccaatttgggtttaaatggccctatgcagacaagggtaactgaacaaaccaaaacagcttcatgtgtttatggcagataaataccaattaagtactagaaatgacatcagggttttttttttttcctgtatagtttcaagttaagagactttttctcccttgagtttgcagatatagagcatcatgaccttacaagaggaaggagagcaacttcccatctgaatgagagatggaaaaattatatgaaatagaactaattctactgttaagcagtaaactacttattacttgagtattaattaggacacttggctacaaataacttataccaaatttgaactatctttatcaaatgtggaatttattccaaaggatacgtttattctaaggattaaaatgtttctcaaggcaggttagggcaaattgcagtacacctcagaaaatgcaatcaaaaccttccaggactctctgtcacatctccttctctctaaactatcttttttattgcagattggcttccgctgttcctcatgtagcagaccatgattgccaacattcccttatatttatatctcgcagttgaaggattcagggagagcctgattctaagacccaagtctaaattctttaaatacatacgtatgtatgtgtatatgtatatgtatgtatatatatatatacacacacatgcattcatgtttagatagacatacacagacatatatgtgaattacattgaattacatatgaattacatttctatttaatgtattcaatgtaggttacaatgcaacgttatagaccttttcatccattacaggtaggaatgtggtttaatatggaatttttgagaagtaatttgaaaatatgtaccaaaacttacggagatgatttttcacctaaatccattataatttttgagactcttttctaaggtaataatcccacatttgggtggaggctttatctatattgatagtaattgcaagactattttaatagcaaaaattatgagaccatttttcaaggttccaaaaaaaagcagaacggtaatttttatgggaacaaagaagacaatgcttctagatatttaaattgtgtttgaacaacattggaaaacctgttattttaaatgaagaaagtaaggtgtctaactacttgtgcaatgcaattacaattatgcaaggaaaatgcaaaggaaatatatcaaactttaaatcctaaagcttttaatactcactttttctctagtttctaaaatttggctaataaacataaatttaatttataaattaattgaccttggcattgtataaacatcagggtaaataatgcatctgtctctctgtctctctctcgctctctttattcaactttatcctaaagcatcatactaattacaatctattggttttagtttgactcctcagctaggttactcaaacaatgaaagactacttttaatctctgaagatgtttctttatcttgaattttgatttcctaatcaatgaatacttgtctaaatttagtattaagttcacacacatcttttctcttttttggattactttgccaatcaataatgttcctcttttagcggttactggttatttctactgatctctgctgagagtttattctcagacactttcataccacgctttgaaaatactggtttccaagctgtgaattcactgtatctatgcagaaaggagtgatttgtttcttgtatggcatgatgttttttatatcctgtgaaaaccatcaattccacatttgagtggttccttcatgacatgggctgctctaactaaagaaaaatgtgcattaaaaatatgtgtccgattaaggcattaaaatatcttaagcagtcaggtagcaaacaaatctttctgagttccaattactgtattacattatgtcaatacttactgtcaaagtacattacagaaaaaggctgggctcttttcagaaagggcattgcaatataatgggtgacaagaaactgcatctgtgtatatggaagcacaagaaactaacaacaacaaaaaaatagtgcccaatcctaggtggctgaagagtaatatctaagagaatatgaagaaaacccattatttattccctaggccagataaggagccctggctttctctggcatagctgcagtgtatataattatacctctttcagtgccaattactgtgtgtatatccataaaaagaatggtacaatggtgacagagatgaagagcagatctcttaaataaacatgtaaaaaaaagcaaagtaaagaaaaataataaaaacaggtctattgctgttaatgccactgttccagaaaaaagtaaaacagagatcattaatatccataagagccagaataatgtctatatttttcatccaacatttttcaaaccatggagcccttttagaatctgctgatgactgtggactctcatatatacacactcataaaattttgcccacaattttaggggtttattccatagtcgtattgaaagcccatagatttcaggataggaataacaatgttgattactcatttggggccagacactttctatgccatataaagataatggcttatttagtcctcacaacgacactatgagatagttattattttagtacctattttacagatgagaaaactaaaggaaagaaaagttatgtaaataaattgagaaaactcagccagtaagcggcaaaactggactttaaatccaggccgtatgattccagagcatactccaacaaggactgtaaactgcatcctgcagaaacaaataaacaaacaaaaacctagaataaagaagcagatgatagagttttagaactggcggaacacatagaaattatcttttccaaattctatgttttaaagttgaggaaattgtattccacataattaaatgattaacagaagcccatagagcaagttagtgttagagccagggttcaagtgggaacattcatccaaagctcatgacaaagctacaccgatattattatcattattctacaggtgaggaaacagaggcacactgttaataagtagcagaactacctttcgaacccagataggcaggttcaaagctaaaactaccatattactgtaattcaggaaagccattccctttataattcgtttagtaggcgctcggaatgatcaaatctttaaattagaaaattcgaatgtcttcaatttacaaactttggaaattctggagattctactttacaatcattttaatgttctctaatcaaaaactaatgttttcagtgtgctacaattcatgaattttatattcatatcagaatataaaattatacacatgcatatatgaactttatatgttatatatgtatgaagcttatgtatgtatataacaatatgtatatgaacacaacctgaatacatatgtatatatagataaccattcaaacattttaaattggctatagaggaaagcaatttgccatttgacttaaagtcttttgtaatgactagaatttaaaataaagtttacaatttatgaagatgaaataaaactatacttaaaatgctgtttttcgaaacagaaaattcccttaaaacctcaaaatctattgtttgttttatataataaaaatccaaattttttctacaatgtctaaatcttttgtaattctgttatattttcctctacaagttcaactcagtgatacctaagtgcaaacaataaggctagtatgagagctttttttttttgagacggagtctcgctctgtcgcccaggctggagtgcagtggcgcgatctcggctcactgcaagctccgcctcccgggttcagccattctcctgtctcagcctcccaagtagctgagactacaggtgcccgccaccacgcccggctagtttttttttttttttgtatttttagtagagacggggtttcaccgtgtttgccaggagggtctcgatctcctgaccttgtgatccgcccacctcggcctcccaaagtgccgggattacaggcgtgagccaccgcgcctggccaaaagttacttaatttgcatgccaacctacactcacatctattaaatgattagtcaatcaagatatagacaaaactcatctattggcaatgtacactgagggacgtgttctcggtgtagtcctgtcaccgatcttagtacagaaataaataccttttttaatccagtggcataataaacctgagaaaagagaagtctttcattaagaatcttggaagaagcagtcgttaaccacttgtcatcagtattagcaactcaagctgaataaaaattgattgtgtgactctggaccttctttgctctgccacttggataatctattagcattggcacctgattaactctcaaaactgtctcctcttttgattagctcccaggatttcttttgtattctcagtaataattttccaaacccttttctaaaagactgactctaatgttcttttactgactgcaaagtttcccgtcagtgctgaaaacatgtttggccttcattcctatttataatttttggcttgatctttcataaacactggcttaagacttccgtatttggtgaacagggagtgaatgattactccgaaactttatttctgttttaagtgctttcagtatttggcacaaggtggaaatgagcaggctcagtactgaccattgctattacaataactcactgcatttccttaaaacttattttccacttaaattgttttctacattgatttctgtctgtgctaatacttggccatgtatgagaacaacctgcttgttttaatgtttaaattttgaatggtatggtaaggagaaagaccaagatttaaaagataatatattctgaaagggcaatttttggaaagcttttaatacttcatttaaaacccattcttcagcttattttaaatttaatgatggaatacaaccctctcttttttaaatgaagaggttatatacattccatcattattgaattttattctatgggccacatttactatttacctgctatattagtcagctttattataggctaatgctctgtaaaaaacaaatccaaatctcaatgacttataagaacaaacatttatttcttattcacatgtcaggttcaattttgtattgagtacaggtcagctctatgcatctctccttttaggaacagaggctacctgaggcgtgtacttcccctgacaaagggaggaaggaccaagaaaagtgaaaacactttatgattcttaagcccctagctcagaattgacacactctcatatctgactgtgttccactggtcaaggcaagtcacatgaccaaggccacatcagtgagtgggatgtgtaatccacccatggtgaaccatggcaagtggaaaggaggaagaaaaagaaaccgatgagcaaataatgtaaactaccaacttgttcaagaagttctaatgcaattaaatatatagtcaggaataataatactgatctctattggcacttactttgtactaagtctttgcttaagactactttcgatgctttacaggatacctcatcaaagtgaagctaagagtttttttaccacgattatttcctcttttcagactggaaatcttgggtttggtgtggcttatgagtcttttctttctttgttttgtttgtttgtttgtttgtttttgagatggagtcttgaactcctgtcggggctggagtgcagtggcatgatcttggctcactgcaacctcagcctcccaggttcaagtgattctcctgcgtcagcctcccaagtagctgggatttcaggtgtccgccaccacgcccggctaatctttttatttttagtagagacggggcttcactgcgttgatcaggctggtctcgaactcctgacctcatgctgcgtccacctgggcctcccaaagtgctgggattacagacatgagagactgcacccggcctatgagtcttttctaacactgcataactagtgcatgatcaagccaagaaatgtgggcccaaattccactacagagagcagacaataacgatgctcctatgggccattctggattacatatcccatgcaacaattgaggagccctacagggcatgcttagcaattgttccattgtttttttttttttttgtcctttttaatacatagacttctgtccctcgtttattgagggttgcccctgggagaactaaatctctatcacttctggactgccctgcaaatgggcttaccaagccctcctaaactgaagaaagccttaacacaaagaaacagagagatgtggatgcttgtggtgaggaatcttcagcatccacagaatccgttcactatagttataggtgaactcagggatggctcggtgaaataagggatgaggcattatcctcatctactatgccattttattaacctttactccatagtgtaagttgagtaaatacatcttgtgatttaaatatccccttataatccaggccctgtgtttgaccatttgtctgtttctaaagcatctcattaacagtatgtttggaaatggctgttgtgtgtcgtgcacatttggctgtttgctttccttttggtttgcaaagaagtattttgcaacccataaaaatagataaatatacaccacagaacaatgtatttttttaaattttcaggggagaatttgaatcttttaaaagtaatattgagtaggcagctgtatggaaacaggcatctagttagcagttctgctacaatatccaagtagttaatttcacctctaaattacactggagaccttgaccttattttgatttattctgtcataattagtctatggttattactttaacaaaaataagtcatctttctcatgaacactaccaaagcacatttcaagtctgcatactaattaatagtaacttatttttactcctaacaagtctacacccacatactcatgtttaaacaagatgagatatttgaaatcactttataaattataatgcaccacagaaatatccattatttccattattactaaaaacttacttcattcttttgagcatgaggaggtataatttatgtgaatatcatttcatattttgtttttatctttcaaatcgagaagacttgaattttttgcatatttacaaatactataaaaatcctactaattattaacatggctgccacgtagcaatcgtgtctattttatgaaataatgtcatttatacagaagacccacgggaagttgtaatatatttggaagtaaagatttataggttttgtctatttttttctctttctcagcattaatatgtcatacatgtgtcacatttagtcttcacaattcagtatctttattactattaccatgaaacaaatagaggcaatgagacacagagaggttaagtaacttactcaaggccacagagataatgagatgtgaaactggagttggaactcaggttatttgactctgaaatgagtgtatgatgtaaccccggcctgcattgtatctaacacatgcaattttaagaggataagaattaactgtttgcacaatctaccagatggcactgtttttccaactgagaccacttaacaccttttcatatactcttggagttctgatcattcttccactctaatacatttcttcaatctcattgtcattatgtcctacttcatgcaacttcgattaattcttcacaagtatatttctacaatacttgtgctatgtttccaatgtatagagcattgcaatttttatgaatatacaactatgcgattatgttaggttctcaccataactccaatttgctaatggagcataaattctgtgattaagtggcagggaatgggagagaacttttattcaatatgagctgacatggctttccaatctggtttctgagtccaacaactccctacaataaaaaagcaattgacctacctgagaaagaagtggcgtttgcagtggaggcaaaggaacagacaggtcatccatagcattttacattgtgtcagaagcatgacagtcatgaaagatgaagtaaagggcaattatatcatattacagagtgaaattcacctagagaaataaaggcagattgtttgcaagaaatattctttctcttaattttttattcattgtagtgatgaaaataagtagcaatatttcagttccaaggctaaattttggggagaagtcattgaaagttagttttatgtctaatgggtgctcaatggataatttaggaaatgaattggtgacagaaggtctataattaacagagtagtttgagcagtatgatgaagtgcagggggaaagcattggtctaggacttagtagatctgagatttaattacagtattgattagtcacttgatttattcaacaaacccttactaagtacctatttctgcttcagtataccatgtttggtgccaggagttgcaaagacataataattctcccatctaagtgtggtcacatttaggaggtaatgagtgggatttgggctgcattattggaagacaacaaactaattttctgtttgtgtgtgtgtatgtgtgtatgtgtgagtgtaagcaagatgagatatttgaaatcactttataaattataatgcacacacaattaaagtatctgtgtgtccatacacatacagttaaagtatttatgtgtgtaacacatatgcataattagaaaaaagcctacacatatgtatatatcagaaggattgattgataagttatgccagggagataagtgtgattgtgaaaaccctcacattcgacctagatcttaatagtgagtgtcctcattctagggagtgcatgaacaaaggactaaagcaagaaagcatatgatttatttatggagaaatttggcttgtgtgactaaggcagacctggtagatgtatataaggtttgggatatgggtgactgccaacaggcctaatcgataatatgtttagaggagtacactggagtcaaattgtgaaggcccttatatgccattctgaataatctagcctgtaacctcatcagagaagctctggatttttcaagttagttctcttaatatatgattgtaacagaactgtagtttctccatcagggaatttagctttatcattgattatccatgatccaactcccctaactccacatataattaataattagtacttaccaatactaccccgtaaacacatcttgaatgcacctactccttttccagccccactgccattcattaatgcaagtcatgcttacttctcacgtggattataggtataatcagctcatgtgtcttcttatttacagtttatccccaaatattctctacactgtgaaatttatttctaaaagccaagcctgacattgctatttccctacttaaaattctgctttgatttcgaactgccctctggctatattttcaggctcttcataaataggttgatgataatttcactttttctagggtcatctctgccatttttatcctcctccaccatctctaggtctgggaaaggaccatactctttctctcacatcctgacactttcacctgctcttttgattttctggagttctcttttctaccacttgtctctctgctcttaattaactttcaaaactcagctgagatgtcacttcatcaaggaagctctggatttttcaaggtagtttccttaatatatgattgtcacatgactgtagtttcttcatcaggcaacttatctgtatatttgtatcaacatacccttttgttgtgtctgcttctctcactaagctagaaggaaaaaagctagagacactgcctttctcacagttgtttttctaccacctagtaggtgtcagtacacatttgtcacttaatagccttaaatatgaaatgtaatttattagtttcctattgctgctataaaattaccacaaatttagtggcttaaaattatatacatttattctcagacagttctgcaggtcagaaatccaaactggaacttactggactcaaatcatgatgccagaagggctgtgtacttttggatgctccaggggagaatctgtctccttgccttttccattttctagagaattcccacgttatttggctcacggccttcttcgtacatcttcaaaaccagccacctcggaccaagtccttctcatagtgctttctaattctccccttatgccaacatttccccccttttaaggacccctgtgattaaatcctgcccactcagataatctgggataatctccctatcaaaagttagctaattagaaagtctaattctatctgcaataattccactttgccatgtaacataatttattcacagatgtcagggattagcacgtggccatttttgaggaggcattattctgcctaccagagtttaatagaattaatatctgcagaggagaaaaatgagaagaggactaaaaagtaaatctggtcttcgttaacttaaaacacctttattgagcactactatgtaacacattctatgctaagtgctgggattacagctctgatccagacagtcactctcttggaaatgagaaaggatgtaggtgatgttattaagaacaacttttgtaggatgatgagcagtgaagactgcattacattgactgtaaagcgaatgggaaataaagaaatatctttgacatgaacagcttttctgttcttcgtgcagaagtttaattattttagacctcctcattgtaagctgaccactaacgtcacctcaggcggtagaaaaatcccataatcaaagactattactcagatttaatagaaagcatttttcataccattttccattgcagcctcctccactctgcactgccattttgtaatattaatggcacagtaaatccactttctaaatatgtcctaaatttgtttccttcctttataatgctccaaaatatcacataaccttatctaatgtttatcattaatcttccatatttttcatttttttctcatgtttgatggaagcagagaatagactgaacttaattgctctcccatattacttcatagttctttattttcttttctttcttttttttttttttttttttttttttttttttttgagacggagtctcctctgtcccccaggccggagcgcagtggcacgatcttggctcactgcaagttgcgcctcccaggttcacgccccagtagctgggactacaggcgcccgccaccacgcccggctaattttttgtatttttagtagagacggggtttcaccgtgttagccaggatggtcttgatctcctgacctcatgatccgcccacctcggcctcccaaagtgctgggattacaggcgtgagccactgcgcccggcttcatagttctttctttaagtgaaattaactcatcccattgcatttcttcactacgtgagtttctaaactggtatcaactttaatattcccttccccttttaaagatacattttctgtgtcacattagggatgaagatcttcaattaacatattaactagcccccaaggaaatatcatttaaaaaatgtttttctaggccgaatgtggtggctcatgcctgtagtcctagcactttgggaggctgagacagaaggattgatggagtccaggagtttgagaccagcctgggcaacatggggagaccccatctttacaaaagaaaaaaaattaaaaattagacagatgtggtgatgtgtgcctagagtcctagctactgaggaggcagaggtgagagaattgcttgagcccaggggtctgaagttacagtgagctgtgatggttccaatgcactccagcctggggaacagagcgagaccttgtgtcaaaaaaattttattttcttgtacagattatggttaattgctttgtgtaatgggaataattgttagtgtttatagaactgtttttctgtttttttttttcccccagtttttaaatgctttcacttacattgtttatctgatggcagagaagaggtcttaaggaggctctccagcatctcgctcctaactctcattgcaatttcattccatgccactccctttctcacattttagagtgcaacaaaacagaattgcataatgaatgagcgtgtactttcagtttcttatcactctgtccttgtccttactgtctgctcagtgagattcatctttatcctcctcctacctttattccttctttactttctctcatccttctgaactcaacctacccattaccttctccaaaatatcttttctaacacccatgtggctacatattcctttctccatgctcctataatacgctttaaatttatatatatttttgtttatgcaaaatgtttcatatttatctatgatgtgtctattatctactaggctaagagctctcccagactgaatcttgtttatattttcagtaactagtgcaatgtccaggtcatagtaagcattctgtaaatatttattttataaattattacacgagtaaatgatctcattatatcctgtcaatagctccatgagttaaagagcaattaatattctcatttcacagttaaagacgctaaggcttggcaattttaaggccacaattctaataagtcctgcaaagccactggaagccagttccacagatttaatgttccctcagtttgcccagtatcattcttctgcagtaacttgctcttgtgaatcaagaatattgcaatttaatatatcccacatttatattcctgagggactaaggaatataaaagttaataacagggtaaaagttcattgtactaatcttaaaaaatatgaaaggccacatatactgaataaaaataactttattagaaggggttaaagattactgagaggaaatacaatttttatgtcatgttagaaagctaattttatatgggatttccccgtagagagaataaaataaaacgttggtcagtttttgcaatttatgaagtagtggttcttcacttcttgacatctccagggaacagttttcaagtaaattttcctaagagagattttcttctttgcctctcttattaatatgcacatgcatgtttttattagtaaaataaaatcagttataaacaaaccctaaaggaaatgaaatagaatatgtgctgcttgaaatgactaaacaggagcatataatcattttgtaataaaacagctatcactttattcttttctcatttgctttgttgctgattgcacattaatatgttttactatagactatgtgactacagaaatagacatcatgttaacgtatcaaaatagtttctagaacaatttatatatgtgtgatgtgtatgtatggtggctttaggttaactaagggtatacagcttaaaatagtcaacttttaagcaatatgacaaatagcaataaaaatatatcaattcaagtaaatacgtataaaattttagcatactaaaataaaaattaaaaggcatatgaccacttgggaaaatatgtccattcactgactaaaagtgagtagcttaattttgatcgttaacttggattttatggttataggagttttctgcaaggaggtcagtgaactctatgaaactatatgcaaatatgtatgtgtagacatttttctatagagaaggttcattattttcatcagataatcaaatggagcccatgacttgaaatgtttaagaattaccaatatataattatctcattccaattaattttaaaatattaaatgctcaatagataaatgagccaggatgtaaacaagtattttgacaaaaataggaacatacagaataaataaatgcatgaaacatcttctacttcattagtaatcaaattaattatgattaaagcaaacatcaaggatctccttacatctaaacaaagcagcaataccgtaaaagactaaagcaacgaaactcctatgaatgacatacctgcggctgagatgataattcccaacctcattctttctgctaccagtagaagtgggtgtgatcacttggaaagtattataaagatatttagcaaaagtcataaaggttttcataatgttgaactgataattttttcgaagacaattataaaaacaaaaaagaagtgagtgcatgagcatgtttattgtgatttagtctctaatagcaaacaaaaggaaagagcagcttatatgagatttatgataaaataagtgaaaaagaaagaatattattttggttataagaaatatgtatttatggggaatttaaaagtgtggacacaaaaattttgattgatttttggatgttaaaatgtttccataatgatatataagacgaaaattgaaataccaaatatcaattagtaaatgtaaaagcattattatttgaagtattaacaaccatatcatccagcaccattaaagaaggctcattattcagttctagatcagttcatacagacaaataagttatgcattgccaaattccaggacgctattcacataggttacaacatacatggaacctccttgagttgttcaaaatagaagctctgatttcatggttgttttgcatttgcgttaatatgttcaccttttgtgactctgattatcttatggtattctgtattgttaattatgcaattataatgtaaatgatagatatctggtcaatgtgaaaagccatggactttgattcagaaaatctgtatcaagttcatttctgtcacttaatagctttattccttctcagcttgtgtttatgtataaagtagtaaattacatacagattgagaagacataattaaaacaaacttatgaatagtaaggcactaagaattgttatgtattttataataataatacaattaattgtattaataattattatgttgaagaaaatatatgctactataccaaaataagacaataattcattgaagacatttttcttgtattaaagacgtagaggtgagagaggacaactagcaaagatgtttatatgttgaagctcacatttagtgttatttacacagtaaataagtaacactttgcacataatgtcaaggttttcgtgctgccttcgatgcttacctaaaaattactccttgtccatataattgaaaagaataaaaattttattctactacgtatttttcacttaaaagcctctagattaaatcacttcaaaagacctcatattgagcttttggcagagggttttgggtatgtttcaaagacatctgaatgtatgctttcaactgactcatttactctctgctttctgacagaaagtacgcatgcacatgtaggaaatataagtggaattgcaaataaggtcatttacttttaggaatatatgtatatactactgataaatgatgcgttgaccaatcttcctccataaagtctatgaagatggtttaattttgaccatttgaaatgttccatttctttttaaaattattttggaagggctagtattaattttatgaaagtaaagatttgaaggaggctagaataggtttgaaaactattactatctgtttttatttattcacccttgtcaacaaaggaaatacttccatattgtagctaagatttatcatataccatatgaataatgttgatattgaacatacatatagaagcttgtgtgaataacataattaaataagaaaaatgtattttgtaatgctaaataaaatttctcacctaagatgacagtttgaaatttatttattcactgttatttctcatattgactaaaggaatctacttatagattagtattgtgatttaaagataaacagatatttttggtgcatgcatatatttgttatgcgaaagtgattccttatgtttttaagagaagcaacggagatttactactgaaaaatatatgagagcaaatatgattactttgtaaagggcattttaataacggttcttttaatccaagtagataaaatataaaatttatcaattttaaatatctctcagatgcattcatttactgaacattaactaatatgattatatttacaataattaaaaaaatagtcttttgcttggagaaaaacattttaatatatcaagattgatgatttttctgtccatttgacttaatactaatttccagtttaggggcaaaaagatcatttgtagaagcatgaattcagtgaagctgttttttaataatttttctccctaatcccttagtataaatctttggggacttttttctttgagtatttatatgtaaggcatgaagagtatcatttgcatttttatttgaaatgttctgacttttagatgaaaagaggtcctagaaattttagagttgtagaatctccccttccttaaagcatgcacgtatttgtcagatgtattttctgagctcttaatttgttcagacagtgtgctaagttctgggaagcaaagataactaaaccatgctcctgctcatcaggaaacctcttccatagtgagatcaggcccatgttagagtatgtagatgctgcaaaggaaggaataatcatttctccatggttgggtggatggcatggggaaaggctccgaaatagtttttcggagtaaatgacagctgagagtttcttttaattatactggagtatctattcataactggcgaataaatactgttattcagaggagactatttttttataatcatacagtatttgaacgactatgggtttggtcatattaattgtttttcagatattacaaatctgaggcgggatcttgctctgtcgcccacgctggagtgcagtgccatgatctcggctcactgcaacctccacctcctggattcaaatgattctcctgcctcagcctcccaagtagctgggattacaggtgcatgccaccatgcctggctaatttttgtattttcagtagagatggggtttcgccatgttggcctggctggtctcaaactactggcctcaagtgatccgtcctcactggcctcccaaactgttgggatcacaggcgtgagccaccgcgcctggccatttttcagaagtaattttaatttggatgccccaaaccagcatcactcatgtttaattccatttatcaatgaatgtaatactaaatgtaaaaaaacactaacacatcataatggaaagttactttggttgtaaaatatgaattatatttaaagttgcttcctaacttttatttttttattttgcattttagatgaaagagaagatgttcaaaagaaaacattcacaaaatgggtaaatgcacaattttctaaggtaagaatggtttgttactttacttttaagatctaagttgtgaaattttcaaaatggactatgtacctgtgtatcttaaaaatccgttttatttctctcatagtgtcattttattttagctgtgcaaatctggaaatattatgttcactcttatttaaggagtaagcagcagaagatatggcaaagatacactatttaattatataaaatgtatatctttgattcttcttgacaatgtgagtttctttaatgacatgagtcctcagagtttatagctgcaatcttccatcaagtagctagaatatgtcacccagcagaagaagatatgagggaattttgttgtgaaaattatcatttttttgtccctcttggtctttaccaagttcaagaaaagcaatataattgctttgggtgtattcagccactatagtttagagcatatttcaaatgattaaagacaataagttcatcttgtttttgtgcaggcttcaatccatactcttaatatttacttaatttgcaaatacaactcaatttttaatcaatagcgtgactctagatgattataggtggacacagagcaagatattcttaccttgaaaactagtattaggaatgcaatatatggaggtttattgggatgtcaaagtttaaaagacttgcattttaattattattctcgatttgggtaaatcaatcaaatgtttggtgagtcggttttcttatgtttccatcatgaatgtttgtatatgtatatattgattgcttaattgagacatcaaatctagataatggaaaaataaagctaataaaatatggcccttaaacccaaggctttaagagtggcatagttttgatagtggatattttgtttcttattgtaatgatttaaagagtcactaaaagtgaaaatttctactaaaatgcctgaaactcttaatagctatgaattactccctctatgggtctgattttgtaaaattcatgataatggagccaaaacaatccactaggagatccaatctcaaaagttctcccttttctatgacaaacatttttagaatatcgtctattctttgtggtatttggtagtagaatgttgccatgtactctttaatttaacttactgaattttaactaataaaagttcattttatttacttgctgaataattaacaaatttctattacagacgtaaacagaaacatgtattttaaaaacgttttttaaatcctcaactttttttagctaagtgaaataaaatataacaacacaaatatagaagaataaataaaaagtaaacctaggatatttaggaaagttattcataattctccgaatatttataagatggttatatatagtttaattgctgtatatactggcatcattgacatttttaagttttggaattctgaagcagacaagagacatattttcaaacaaacatacagacaaatcagaattgtgaagaaattttctgaaatagtaaatgtaacaatactctgaatctttgaattgaactagagtaatttttaaaaggtgtgtaaacatgacaagtactgtgtatcctcattcccgcaagttgaaatagatcttcgctctgtgcattaaccttttccattatcatttatcacaactcacctgttaatatagaaatcaaagcttgatatccaatccatcctctatttatatattgttagcactgcctcagagcaattcggtatatttttttctgtccttatgaatgcccatatcttaaaactgtaaaatattcacatatatgagcacatttattgttttcttccaaaatatttgcatcctctaactcaactcacacttttcatttatattacaaatgttctccctaagtctgttataactgatcaggagagtcaccattctttcaagtacagaaattctattatcaagcatatcctaggtgtcaggaatagaaataaaagtttacaaagacagaggagaaaacttatttaaaggtaaaatgtatatatacctgtgcactaacttctaattttgagaacttgcaaagaatctttttcctcttttcttattcttttctgtcaaaacttagctaagtgactgcattcttttagacacttttgaagaagatgggaatttagaggaagctagttgattcagtttaagccacttggtgaaaccaaaagataaacataattgtgatatatatatcatttggcaatttattgcatcgctgcatgcctttcagcagaattctagccctgtaggatacacagattagttgaagtggaatctcctgaactcatggaacctacacagttatttgggagtttttggttaattgataaatggagttagaactgagtgggctcagtgtgggtggtctgagaaggcagtaatctgagctagagggaatctggtaacctttatgaagaaagctctaaaatgtgagcccatcaaaggcaggaatgtatatcttctatataatctcattgtttattactagtacactatataaatataataaatatactaggtcagtagtacaaatcattaaatctatgctaactgtagaaacagaagaaaaactgggtggaaaaattgtgttgaagaagactttaaaaagagaaaaaagagaatgaaaaattctgtctgtgtggtaaattagacacaggcacacacacattcatacaactataaaaatgcctcactaataaatctaactcatattcatttttatagtcgtattaatgtctatctgtgtctactttaccacacagacagatgataatttttcattgccttttatacacacatttatataatatttgtaaattatagagagacaacaaaatatttccttgttattttgtaaagctacggaagggatatttaaaggaaataaatgtgattaaatgtatccttgttgttgtggcgtcatttgaagccaaatgtgtctttgcagtaaatctaactgattttccactttcctggtaccattttaaaaataagccctatctctttttaaaataagtcttctattaactttgattccaaaaaattctactagaatgtgatttatcacatctattatatagagataactgaacaatatttatctccacataaacacaaaaccatttctagataagattaattcagagtaaatattctttccatgtaatttattgatatgttataatcctttaaaaagcctcgtgtatactctatgacaaatatgattcgcattataaaaatcttgctcatccatgccggcttaataaagggaagtacagttttgaaaacatgaccaaaaataattttgtcataaaatgtgcttgatgtttgtgtttgagaaaaaattttatgggaaaaaatatttactgccagctcaattgagagagataaactatctcccaatgagtgatatgatggttttgatcctatactgaatttagtaatcatctttatttccatactcactcttctgtctgatttttttccaacatagtatgcatgtttgacttaaatgaagtagaaatgcataattagttttgtctaatgtcttcacaaaagcccatgatatgatagtgttcctggaccaaactgaggattgggctgcttattcttgtggcccaataacgagatgcagatgaacgggaaaaggagagagtttttatttctgtaagtggttacagggagaagacctggaaattatccccagaccaactcaaaactataaagttttccagagcttatataccttctacgctgtatgtctacatgtaagtgtgtatccatctaaagacataaatgattaacttcttctgatctgtaactaagatctgattcctgaagacattcctctggagcctcagtaaatttactttatctaaatgggtccaggtgctgggatgattacccttatcttatctccggctaaatcatggagtttgggggagttccttcagatgcccagtaaacttgtttgtggagtcctggggagtttcttcagacccccaataaagcttttttaattctaaaagggtcctgttaagaattccttcattatcttgtcatgcttcaaggcccaggaaaggcctgggcaaaactcttggtgggcttttgttaccgtccagcctttgtttaagggcgctggctctatcagcttttaatatgtaactttaccactcagtcagtgctgaaacagttgttgtggaggcctgcattagtgagacctggcctgccacaatagttcatttacctcttcattgccgcaacatatatgtccacattaaaaatccaggactcaccctctttgggcaatatcatgtgataaaataaattgatatgacatacttcttgcaagatttctttttaatttaccttttagccagcatgataagcatgatgtagggtaaattaacactaaacttttgagtcagtaaggtagcctttctttttttaacttttattttaagttcaggggtacatgtgcaggtttgttatataggtaaacttgtgtcacgggggttggttgtacagattatttcatcacccagatattaggcctagtacccattaattatttttcctgatcctctccctcctcccaccctccaccttccgataagctccagtgtgtgttgttcccctctatgtgtccgtgtgttctcatcatttagctcccacctataagtgagaacatgcagtacttggttttctgttcctgcatcattttgctaaggataatggcctccaactccatccatgtccctgcaaaggacatgatctcattctttcttatggctacatagtattccatggtgtatatgtaccacattttcttggtccagtctatcattgacgggcatttgagttgattccacgtctttgctattgtaaatagtgctgcaatgaacatatgtatgcgtgtcttataatagaatgatttatatttctctgggtacatgcccagtaatgggattgctaggttgaatggtagttctgtttttagctctttgaggaatcactacactgacttccacaatggtttaactcatttactctcccaccaacagtgtataagtgttccattttctccgcagccccaccagcacgttattttttgataaagcaggcttcttcacactactctctaccttaggagaaaacgttatatccatactttaatttatttgaaaagaaaggtgaatataaaattgaaattctctgagtcttatttttcttatatgttcttgcctacttgtaacaaaacatataataaaagggcattataaatagtaaatcatataaacacaaaatattcccatttttgtcattatgtaatgtattttctgaattgaattgaaaaatgcatatatttatgaatttttttctactgaatctctccttcttatttacttctattcttttccatgatgttacctggtcttcttgagaacatgatattttaattgtaatcattgtgttcctaactccataatttcatgatgctattgaaatgcacatgaattttgattctataacctagtttgtaataagccatatttccttgtttctctacattggttgaatctgttcctgcagcaactagtaaccccaacaatctgactggtgagaaattcaatctccgtaacattttgcattcttctacttcttcccacttccattccaaagggccaggtagagtccagaatactgtaagtgtcctggttttcagtgcattttggtcatagctgatatgcttaatagccaagtaaacatgactacataaaggacagcttgtccacaatgccctgccttgcttgaacacggaaggttttgctgatgatgctctgtgcttggtatctggcctctacagccatttaagtaggttgtctcagcacaacatttggaaactctgtaaagggagtaggatgttggccttcacaacttcatccctttccctgtgtttgaggaagctcattaaacctctctttaatctgactgattgcaaatttccactgtccccgaatcttaactcccatatcccaatagcctgttcagttgggacaatatatcaatccttaacatgaatctagattttcagaactaaagtttttgaagggtgattttcctctggatacttgttcatttctttattgattatggttttggctaccttcttggcatcaaacagggaaaacagagcatttattcatgtgttactatcctattacactctgtatgccaattcatgtcctcaacacgtacacacaaacacacacacgcgcgtgcgcgcacacacacacacacatacatatacacacacccagtaaacatattctatatttaaaatgagcttagaagtttttaaaaaaggatgatactgggacaaagtggcaaaacattatttcagtgaaggaggtaacaatatatatgtacctttccattgtgtaagtgaattctaaatctgtatatagctaacacatttatatataactattgtgcaatgtgcctgctttaacagaagtaatcgagcagagctattgtgccatggaaggttttacatagatctaaaatggctcctgtgcccctggcttcctgtttgtttttatctgataataggaagaattaaatcattagagcagatgacgtacagtgaactatgtctctggatgctgatgagcagcctgcacaagactttggtaacaattgaattatttagtgcaattattttggagagatgaatattgatacaggaaacttacggaaatcctcgtttcagaaatagtgaggattgggaactttttgtttatgtataccatgatgttaataatcctactgaaaattatatgtatatggttagttgctccaataatcatatgatacaagtattcaagatgagtaaaatgtgaatttatgtggcttgctcacagtaaataggagagatgaagctaggacccaagaaaatggactctaaaactcatgatatttccatacctattattgttgggacaaaaattccacctacccaataatgcatttttgggacaaatcatcaaattgataagtcctatgagaagcaggcaggggggttggagacagtgaagactcaataacaggtggtattaaatgctcgcttactcacagaggatttaatctacctttgaatgtttagtaaccccaaaatgcaaccattgtttaggaagttttttagttgattctttctgaatgatttctaatacaaatgcccctcaacttgtgtggttaggtccctataaacccatcataagttgaaaatatcacaagtcaaaaatgcctttaatatacctaaccttcgaaacaacatagcttagcctaccctactttaaatgtgctggcttaacactatcctagagctgggcaaaatcatttcacacaaacctattttataataaagctagctcatgtaattgattgaatactgtactgaaagtgaaaaacagaatgcatgtatgggtactcaaaatacggtttctactaaatgagtatcaccttacactattataaggtcaaaatatcttaagtcgagaactgtttgtactttaaatgttaatattttttacatactgcgttttggtgagtgaagtaaacttagtttgcagtagagttatctaaagtgatattgtcattttcaaacattgctttttatttctactactcataaacaaattattgtgtttacatgattatttgaatattaacttaaaacagttttatacgaaattcaaaataccactttactggcatgtgaactccctaacatctacacttggtgttaagatgacttgtcgaatgatgtgtttgtgtttggaatcaagatgattatactaaatggtttaatctactgagaaccattcccttgaatgttttcctgaaacaatctttgcaaagtacctaagtaacaaaggatattactcagttagtgagacaaaaatggattgtgataggtctcactgttttcaaagaaagacaaatcacttattgttaatagtaaagaagtttcttagaaatatgttgctgtttatcaacccagtgttactgagatcttgacaattccttttagaaggtaaatgttttggtctctaggttatcatgtcctgatacaagaaaattggaattattgattacacctatattctctggagtggtctcagtgccaagcatatttagcttgcatatgtaaatatttaccaattagcatgatagttgctagcaaaaaaaccaattctttatggctgatgggcctatccattatttatctgattttattttgctttctagcaaaacaacatacatggacattagtgaagcatttttatttagaaaagaacaattgacactctggtaccatcctatcagagatatatgtttactaaaataacctttcaacatttaacaaatacttattgaatgccagctatgtgctaatcatactgtcatacagtgatgaaggcataacccaacatggttttccctctccaagagattatcatctgagaaaggaaacaattgcatcaacaaataattaaaataaaacataatctttaatgcaatagaaatgctgtgggaacatagaagacagaatgactaattgcttggagaggataatagctttttaaaatatggtgacatttagtctggtgttgtctacgcagagacaatttcaagaaagatgaaggcagaaggaattgcatgtagaaatgtgtaataatcaaagaagtatgacttgtcaggtgagtagtagcaagggagatctttaggagtgaagaagagaggttgtgagagggcatataatgccattcttgaagaattatattgttgtggggctggttgagccaacaataagataatggcttagtcatgttaatttgcaacttctgattgaagactgtgaagctctaaaacaacaggcaatgatagaagaattagactgccccaccaccactaatgcttcatgcaaaatttggtctgaagtctaccctttacatttggcaatagacatagagacctaaaatggaaaagcaagcaggctaccatttttgtagagttgtttgataccatgcacactccaaaacgatgcagcaaaacgcattggaattacctagaaaatgtgttaaaacatggattgctgaggcccatagtcagagtttctaattccataggtctagggtgggacccaggaatccggatttctaacaggtcctcaggtgatgctgatgctgacggccaaagaaccacactttgagaaccacagtgttagaatttcagtaatttaatcaggtctgtagtagagaatgttggaggaaaccccactgaggaatttattgaaccctcaaaggggaatgacctttttccagttgagaatcaatgcaagtacttgatttaaattgggatttattttgtggggactatactcaaaaactgaatgagttaaaagactcaaaatcaatcaatctgatactgattgagcattcttcgtccaaaacgtttgaaaatagaaatgtttcaaattttggattttcgtttggaatatttgcattatacttactggctgagcatctcaagtccaaaaatctgaaatccagaatgctccaatgagcatttcctttgtgtgtcatgtcagccctcaaaaggtttctgatttgggagcattttggatttgggatttttggatttgagaggctcaacctatacctattttttaaaaaatgtgtatatatatatatatggatatacatacacacatatatatgtacatatatacatatttatacacatatatgtacatatatacatatttacacacatatatgtacatatacacacatatttgtacatatatacacacatatgtacatatatacacacatatgtacatatacacacacatatgcatatatacatacacaaatatatgcatatatacatatacacacatgtatatatacacgtatatatacatatatacacacatgtgcacatatgtgcatatacatgtatatatacacatgtgcacatttgtgtatatatacacgtatatatacacatgtgtatatacacatgtacacacatatgtgtatatacacatacatacgtgtatatacacacatgtgtatacacacatatgtgtatatacacatacacacgtgtatatacacacatgtgtatacacacatatacacatatacacacatatacacatatgtgtgtatatacacatatacacacatatacacatatgtgtgtatatacacatatacacacatatacacatatgtgtgtatatacacatatacacacatatacacatatgtgtgtatatacacatatacacacatatacacatatgtgtgtatatacacatatacacacatatacacatatacgtatacacacatatgtgcatatacacatatacgtatacacatatacacgtatacacacatatgtgtatatacacatacacacatacacacatatgtgtatatacacatacacacatacacacatatgtgtatatacacatacacacatacacacatatgtgtatatacacatacacacatacacacatatgtgtatatacacatatacatatacacacatgtgtatacacatacacacatatgtgtatacacatacatacatatgtgtatacacatacatatacacacatgtgtatatacacatatacacacatatatacacgtgtatatacacatatacacatatacacacatgtgtatatacacgtgtatatacacatatacacatatacacacatgtgtatatacacatatacacacatacacatatgtgtatatatacacacatacacatatatgcacatgtgtatatatacacatatatgcacatatgtgtatatatacacatatatacatatatacgtatatatacacatatatatacatatatacgtatatatacacatatatatacatatatacgtatatatacacatatatatacatatatacgtatatatacacatatatgtatatgtgtgtatgcatatagacacatatacatatatacacacatgtgtatatatacgtgtgtatgtgtgtatatatacacacgtatatatacataagtgtatatacacatatgtatatatacgtatatatacgtgtgtatatatacatgtatatatacatatatgagtatgtgtatatatacacgtatatatacatatatgagtatgtgtatatatacacgtatacatatatgtgtatatatatacgtatacatttatgtgtatatatacgtatatatacgtatatatagttgttttaggttataagacttaaaaatacttatctgatgtatatatatatttttaacaatcctagttattttgtgtttcagggcagataggtgatgaataaagatattaatataattgtgttcaaaggttagaaaaaaacagttcgttgtggcattactattgactgtatccgcaaatttctttcactgcaatcctttcatgggctactatatatttttcttaagaataaaacatttccaattgacctacagagtctttcaatctctcttttgtgctttactttgcttcagcagaaggatttcattttagtgacactctgaaggtcttcctctgtgcttcacttaagggtgttgcatttttaaccttaccaagattcctatggattcctagaattatatttcaaattatgatcatggtagccagaacacaaagaattaagatctactctgacagtaatgtactgatataactttaactgtagaaacctttcttgtaatgcacatggagggcagacttgtatgtatcttggaacataaaaggcagagtatggtttttaaaagggctttgcttatttgtatcctaatttagctaatttcactatgccagttctatatgcagagataagtaatagtaaaaatggacaaaaagtgatcaataaacaagtgatcactttcggtcttgtccagaattgtggccaggtgatgagtgcaaactaagagaccttttcattagaaatgtgtgaagttactctttggtttagcattagctgtcttttaatgagaacaaatgagagttgcagatgaatttgctaaatgtttctttctttgatttagtttacctggcctgaagaaaaaaaaatgtcttcgatctacaaggtctacggagagtacttttcataggaactagtcctattaaaattacctgcagttattatgtcagtcagagaataaatattttgagtatcatatctgtacttgaagttcttatcctttacaaataatttatatttaaggaaacatgctttgacagaaatacacatgaagtctacattctctatctatttcatatcaggtgctctagtgttttgaatataacagttaagagatcaagtccctttaatcataaggccctgttagctagcgagctaaaccaaagagggaaacatttagcaaactatctgacgttctctatatttgtttgtcaacttgtttgttttttctctctgcaagtagaatatagaatttcagagagtgacaagtgctaagagaaaaaataaagcaggataagggtagaatagggatatttcaaagggtaggttgccattttatgtagtgggtcctggaaaagcctcacttaagaggcatacaaaaaacctgaaggaaggaaaggagggcatcttgcaggtgtcttggagaagagagttctaggcagagggaagaatatgtacactctgaggagggagtgcgtgtttgtgggataacaagggagtcaagatggctggtgcagagtgactgaggaagagcggtaggatctgcaagtggagtggtattagaaggacaaatcagatagggccttattgaccattgtaaaggtcttggcttgtacattgtgggagattaggagattttgagagttctgaacagtagccagaaataatgtaagttagaatgtaggatgtaaaggtagaagtagagagatgagttagaggataatgtagtaatgaaggctgggtgtgtgcgtgtggctaggattaggttgatgtccatggatctggggagaaatgatcgaattttggatacattttgaaagtagatgtaacaggatttgctggtggactaaaaatggagattgagagagtggagaaaaacagttttagcttgagcaaaaggaaggatgggatggttatttactgggataagaaagactattgcaagagagagtttggtggcaaagtataggtaaatttcccatggaaaatcattgaaaataattttagttttagtatgtttttatggaaggagtatttattttcaactcctaaaatttatcctcaagaacaagaataaatacatttatctctattaaaaaataaggaacaatgagagatgatacaagtgcctctagcattgtatgagtgtgtacaaccagtgaacgttaacttgtaaatccagtagcagtaacttgatctttgtctctcttctgatctgatagagtgcaaggtctatgtctacattcatttttttgcatgtagatgtccagttgtttcagcattatttgttgaaaaggctatctttgctccattctattgccattgctcgtttgtcaaagatcagtaaactgtattcatgtgggtctatttccacactattctgttctattgatgtatttgtctattattttgccaatacactgtcttgattactgtcatttcatagtaagtcttgtagtcagatagtgtcagttttccaactttgttcttctccttcaatattgtgtgggttattctgggtcttttgcctttcatataaactttagaaacggtttgtctatataaggcaaggtaacttgctgtgattttgattgggattgcgttaaatctgtagatcaacttgaggagaactgacttctttacaatattgagtctttctatccatgaacactgaatatttcaccattcatttagttcctctgataactttcatcagagttttgtagttttcttgtaaagatcttgtatattttttagatttattcctcagtattttatttttgaaaatgttagtggaaatggctttgtgttttacatttcaaattccacttgttcactgctggtgtgtaagaaacaattgaattttatatattaatcttgtgtcctgcaactttgctacaattgcttattatttccagggttatttttcgattctttcagattttctacatagatggtcatgtcatctatgaagaaatacagcttcatttctacattccaatagatatgtctattttctttgtcttattgcattagctaggacttccaatatgatgttgaaaaagagtggtaagagagacatttttgtcttgttcctgatcttcctgagaaagttttcattttctcaccactaaataggatgtcaattataggtgtttttgttcatttttttatattgtcatgaccttgttttataaaatacaattatttctctcctaactttctgtggacctcaattataattttcccataattctcttctgcttgcattgctcatgttttctgtcttcttcccatttgttcttatttgctttattttgaggaactgtttctcattattgaagtcattcctcaaattacaagtgatcttagcttttggtttatatttaagtgtgagatactaacatttgataaaattaaaatctatttcatgattaaagtacatttaatataaaacagaattgaataattttgttgacatattatatatatatatgcgtgtgtgtgtgtgtgtgtgtttgtgtgtgtgtaaagtccaaaagtttgtacattacttaaagaagaaacatctgatgcattctggataaagacaggaaaaccatatgagtactacagctacctccattaatacttaacattgtgttgaaaatattagccattgcaaccagacaagataaaccaattcgaggcaaaacaattgcaagcagtggtaatgggatcccaatttacagatagaattgtttacctcaagagatcacacaaaacaataatattaacaaacacaaatatgaacacaaacaaataccaataaaataatttagtaagttagcagactataaaatttacaggcaaaatcagtaaaattcattttataggtaatgagctagaagtttttatggatggtgcacacccatttgcaacaatagcaacaacagcaaaaacaagaaacacatttaacaagaaatttcagtacctatgtttaaaactctcctgaacaacccaaaaggaaatcaaggagaaagatgctccttgttcctgaaaagcatggcttaacattataaagtaaactattgtttttaagttaatgtgtaaattaaaggcattccaatataataagtagtatttttttctggagttggataaattgattataaactttttataaaaaaatacacaagtaaaaataaccagaaaaacactaaaaataaatatcgatgaagggatagggaaacataaaattataaattaaaacttagggaaaactatcatattaaatataaattttcaataaaaactaacaatttgttaaaatgtgttttgtaaaaatatatttctatcagctgggaaggtctggtagtaatgagtatacctagcatgcagatattcattggtaagtctcattccacactgaaagaagtcacagctcattagaagaatatatgatacttcatcctggccaaggaacatagtgggtgagcctgcagcctttgttagagccataaggcaaggaagtacttcccaaaatttgctaacatcttgagttgttcatttttcttctcctgttttctttatgcttgtagagttacacctttttaaaaggttttcttcctgtcattttattggaaaggcttcaaataatttttaaaacatatttatagatgttcatactcatatattttcctgatactgaaagagaaatttatgcatttagtaacaataaatgttggcctagattttctctgatggtctcttcaagaatctggagcgttctctatctccacaaaggatggaaatgtttcatttcaatatgccagttttcaagtaaatgtgatttagtttctctcttttaagaataaagtcatagcagaatgctttatattactgattgtagtatcataacttacttctgaaacatcgaatacaattttggaaggtcagcaatgtcctgttaatatttaagtatgcctcactatataatatgtgcatacattctggaagaagcatttaaaatgaagactgtttctaataatatattaaacgagctatgtaagtagagttttatgatagctgatattgtgattttattcagagactatttatataagacatttcagcatatctgctaaagaacaaacctatcatctaagtcagtaaaccaataatttgaattaaaaaaacggacaaaaagaaaatacgaagcaacttgaaagatcattaaatacactgcctgatagttaagattctaaacagttacattatatgaatagtttactgtatattatatattttctatttccactttgttataggtaagctaatcagatgtctcaagttataaaataatagcactaacttataaaagaagtgctacctttcttccactccccaaaatacacaagattttattcttcataaatgataacatttgttgtttgttttctgtggttgaaagggaagtacaggaatgaaataatgtattttgcaacaacttggatagaactggaggccattattctaagtaaagtaattcaggaatggaaaaccaaacaccgtatgttctcactcataagtgggagctcaactatgaggatgcaaaggcataagaatgatataatggactctagggactcagagcagggggaagggtaggagatgggtgagagataaaagcctacatattgggtacggtgtatacttctcaggtgatgggtgcaccaaaatctcggaaatcaccactaaagaacttacccaggtaaccaaaaaccacctgttcccccaaaagtattaaaataaaaaaatttaaaattttgaaaaattaggaaaaggaagtacattttcatgtgttgctctgttttagcacacctggtgcagaggtccctgaggaattttttctttttcttttttcttttttcttcttctttttttttttttttttttttttttcgagaaaaaaatatcacacatttgaggcaggagaatagggtctggaggaagggaacctaaggccatttcacgctgacttccctaggactaaactgaaggcaaaaccctaactttccacccctaagtaacataaggaccagaggctactccctttgcaaacctcccaccttttctgtgtagcagatgggaaattggctgttcccaaccaatcagactgattgcgggcccagtctttgcacagaagtgcaactttgtaacttcaccttagcctctgattggttgctttttgcaaccaatcagatgtttgcacaggagagtgtcctatgtaactctacttcagcctctgattggttgctttccacaaccaatcagaccaattgcaggccaccacttcatttacgtggggtgagcatgaagtggccaatgggaaacctgtagagggtatttggaccccagaagattttctttatctgggcacttgagccgctgctcagcccgctctcacactatggcatgtacttttcattttaaataaatcccttcattccttccttgctttgtttgtgcattttgtccaattctttgatcaagacaccaagaacctgggcaccctccactagtgacacactgataagatcttattatattgggctgataattcacctacacttttaccttctgaatagaaaaggcacttgattagagatgtatatatctaggtgctgggatcaactatgccatttgcaaagtaccttacttcttgagcaagaaggtaaccaaaaggggaatgaataggcaatataatttcttttaaaaatgaattagtaagctcttgtggttacaacaagaggactgttgttttggttctttcacaattttctatagtaaaatttgttagtattaaagtataatgttgatgcctatatttttaaaagatataaaagtagagattttaaaagagaattaaaaaggttttgagggaactgttttagattaagtaagataatgaagagaaacaatgcttaaaatattagaaaaaaagacttatgagaaaagtcagaagtactgaaactgtctagccaaagtagaaacgaaaccaaatgatacctttctcattcatattaattatttgaatgctttggttttgtttttctttattttatattctgttagacgctgtctttcttgtcttcaaccaattcttttctatgtaacattagacagtgtctaataataatacacaaaacaaaaaagttgtaaagaaaccacccacattttctcttcaaaagaaaaaattgtctgagaactctgaatgtctaaagtccttgaataataatgggaaatggaggatggttcatgagtgtttttcagtattagcaaaagactgacaaaagcatgagtttatcaacaggaagtacatatagtcagacttatagactgaaactgttcctaaagctgtgtgtccctgttttagaactatcaccacagtcactgaagccctgggcaattcacagacattgcaaaatcaccacagtccctgaaggccaaagaatgagacacaggagtcttttatcatttcataactcagtgtgcccattcttcctaataggcaggacccagcatctgtggtcctcaatacaaccatttagaaagtcacattgtagtcactccttttgcttgttctggcagggactgaagttggagcacaaaaaatcttgtaaaattcagttcctatatcagggtgtttccccctttttatcatgaagtcacatgtcccatcctgtgtcttaacagtaggtgattattagaagagtagctggcacacagtagatttataataaacaatggaataattagagtgcctagcgcacagtaaatttataataaaaaatatagaataattaatgatgaagaaatgaatggtagatgtagtagaatagaaagatatataggaatcctgagaagtttggcagcacatccaatagaaatgtattgcaaaaagtttatatagtatttacatttcttatagcctcatttaaaaactgagaagaaacaggtgaagtaattttaataatatttatttaactatatgtaaaacaaaaatattatttcttcaacaggtaatcactatatcaattagtattatttattgcattatttattgtaccacctctctaaattccgttgtgaattttacacttccagcaaatctcagcaacacgggatagccactattcaggtgctccaaagccacatgtggctagtggctaccacattacacagcatagctatagaggggtcttagaatattctgactaagtcaggaagggacttttgtcacctccaccaacatcccatgggtcagaacccagttatatggctaaacttaattgcaaaggaaactagaaaatgtaactatagaggaatctttaagaaactattggtcagacaacctaagtgtaatgtgacaggatattatctaaaatcttaatttgaaacaattacatatagttgatataaaatgcataaaatagagaaggatgtactatttttgaagccaggttcaaagtgtatataatgaacactattgaacaaagcaagatttaaaaaaaattgtgaattgaataaaatatgtatagtaaatgtacactctattatgtaaactaaagtatgtttagtataaaaacacccctatactaaaactcctttcaatactccaaagcagtaagaaaaaaaacacaaaatatacatttaccaatcttaatagtctagcttataaactgatatggaattcgttacatgatccctgtttgaacattatgtaagactagcccaggaaatgatatggaaaaaggaatgaaaggtaactttcaacgaagttacatgggagagtgatcaaaagaaaatgtgactttttttccttaactcaacacgtgtacgtgacgcttcaagtatgcaacaatggatctgtgctcaagtcaaatgcacagaccagaaacagaaattggtcagaagacatttcttgttttttcggttttttttttgttttttgtttttgtttttgtttttgtttttgagatggagtctcgctctgtcacccaggctggagtgcagtggcacactcttggctcactgcaacctccgactccctagttcaagcgattctcctgcctcagcctcctgagtagctgggactacaggcacgtgccaccacacccggctaatttttgtatttttagtagaggcggggtttcaccatgttagccaggatggctcaatctcctgacctcgtgatctgcccgcctcagcctcccaaagtgctgagattctgcgttggtcatcaatgtttaaacatgttaaacgtaacatgttacatttaagtaacaatacctacataatcatgtaagtacattcattgccaacttaaaagggagtcttcaaagcagaattgtcagaacttttagcttccctgggccacactgggagaattgtcttgggccacacattaaatacagtaacactaatgatagatgatgagctaaaaaaaataaatctaaaaaatatctcatgatgtttcaagaaagtttacaaatttgtgttgggctgcattcaaagctgtcctgggcctcatgcagcctgtaggctgcgggttggacaagcttgcttcaaagctaacattttttctccaaaattttccctactgctatcgcgatcaatttgtttcctctgaagtgactgattttaactgagatatttttgtttgtttgttttctggttctgcatgtataaatccttcgaatagtgtaaggacactgaatttccagcaacttctgtttcgaaggttcacacttcaaactataacatgttgtgtaattattggaaaagtgtcctaaagcttccattattagcctataaactatagttttggaagagactttgcccaccattttacattactagctgtgagtgcctaacatttagtaagtacccaagaaatatgaatgttagaataaagtcatacatataagaaattctttacattgttcaactactggagaatatgttatatgtagtgattatttttaaaagcattataaaaagcatttcaatttgttcaagcatctcaataagttagttaaaatacacagaaaatgaataaaacaattagaatatatatgtagcatttgtgtgtgtgtgtgtatataaacatatatatgcaaatgtgtgtgtgtgtgtatatatatatataaataggtagagaactttaaagtaattaaaatctgaatgtggttagctcaagtcaggtaaatttgagaaaatctttacaaaagccatttgctcatactactcactctcagattagttgttcatcaggtaaacaatttgctaaataaacatttaaataaaagaaacacattgcataggggaagaaaacataattttacctctaccttgattttttttttttttttttttttttttgacactgggtctcactttgtggcccaggctggagtgtggtaatgcaatcttgtctcactatagcttcaacctcccgggtttgagccatccttccacctcagcctccccggtagcttagctacaggcatgcaccaccatgccgggctaatttattattttttttactttttggagaaatgagggtcttgctatgttgccaaggctggtcttgaatgcttgagctcaagtgatccttcagtctcagcctcccaaagagctgggattacaggtgtgagccaccgcatctagcctctacctttatttcttaactgggactcctataacaaaagagatatcaacaagaaaaaaacaataaagtttactaacatacacacctcatgtatacatgaaagatatataaggaaaaatgaataaatttctctgacaaagaacaatacgttttttgagaagtaacaagacaagggaaaaggaccctgagtctctatgagtggccaatttcaggaaggcaaatatatgggaaactgatggtagataaaggctagttaagaaaatttattatgtagattcctctgatgcagtctccgggctgataaagatctaaagttgtcattggtgatcaaactttgtcctttctgatagagaggagaggatggacacctttgcaaatgtatgtactgttttcaggcaaatagtgggagggcagagaacttatatctgcttcttctgaattgcctttagctcaaaatagtcctgtgtcaaagtggcatattttcatgaacatagagaatggaataatagacattggagacttcaaaaggtgagaggggccgggtgcggtggctcacgcctataaccccagaactttgggaggctgaggcaggcagatcacgaggtcaggagttcgagaccagcctgaccaacatggttaaaccctgtctctactaaaaatacaaaaatcagtcgggcatggtggcgcgtgcctgtaatcccagctattcaggagaccgaggcaggagaattgattgaacccaggaggcggaggttgcagtgagccgagatcgcgccactgcactccagcctgggtgcacagggcgagactccatctcaaaaaaaaaaaaaatggcgggaggctctcatgtaccccagaaatttatacacctacagtgtacccacaaaaattaaaaatacaaaattttttaaaaggtgagattgtggcaggggagtgaggagtgagaaattacctattaggtacaatgtacactattggagtgatggtttcactagaagaccagacatcactactatccaacatatgcatgtaacaaaactacactgtacctcctaaatctataaaaataacaacagaaaaaggcaaatatacatatgctttcttatagattcattaatctgttttatttcagtgaatgaaaacttttgacaatggctaaccttgaaaatatgttattagaacatgtttttctttctccattgtgccctatgagcacaacttgagaaatccagcaataaaatgcaagctagtttttttttttttttgaaacagtcttgctctgtcgcccaaggtggagtgcaatggcactatctcggctcactgcaaccttcacctccagggttcaagcgattctcctgcctcggcctcccaggtagctgggactacaggtgtgtgccaccatgcctggctaattttttatttttggtagaggttttgccatgttggcccggctggtctcgaactcctgacctcaggtgacccgcccgcctctgcctcccaaagtgctgggattacaggcatgagccaccgcggccatcaagcctgctttcttgacatattttgtgacatattttgggatggcatatttcggtctcctacagttggcagggcaatctaaagtactttaatatccttcttcatgatactttcaaaaaatggaatttgatgcctcagaaaacaatactaaaactttcttaaaatattacaatgtgtactatattacttttttaagtaataggacttataaatatttatttttaaaatttgtaaatatttaccatccacctttgattgaacatttttttctcattattttatccaaaaatgtctattgagacctttaaaatttgtattttgtggcaccatctaagacgtgatttatgctccttgtcattatttaatcgtcaaaatgatactttgtctttgcttaaatcagtgtgggtacatcgaacaaggtttgagagctactctgtaggactgagtcattagcctgtaattttacagcggatcaagtactacgttttcattacttggaaagaaaatgaccttgcaattgactcttacatttaacgtttttatctcagctttaccaccattaaatataactgtttgcactgaccacataagaaaccagaaaaatcactgggtcacagtttaatctaattcaatttaaatccgagctagatagctataattggcagtttaccatatcaaaggccagagttaagttacactcaaaattgtgttgatttggaagtaatttgccttaaattttcaagcattgttctgggggtactaaaatgctctttcaagagtttactatatggtacgtaatattttccaagtgttagatgatttatgaagtctacattattatctaaaacaaccaatgttgtaactaccatacaagtctatgaatagaccttatttcacttggcctatctcagggtacaggatcccagccttcttccgtggcaatatgcaggctgttcctcagcaacgatttctagtattgtgtgaaataatcatacttacaatactaacttcttgcttcccaatgccaagaacactcatcttgtttctattgaataaggtgacaggcatgatagaagcagggcagagccaagtcctgacagtaacatttcaagtacagagaaattcatatgagaaaaatggacaatgagggcttgttgtccgtgactttttgttccatgaaaaatatgcctgttagcaaaatcacataactaggaattttagataaagtttctatgtacattatttaaaagagtgctttatacggcatttaagttaaaaagaaagaaaaaacattcacattaaacctaaaagtaactaaaaagtcatagaacagagatgtcatacagatggctagcctttattaagtgtcaagcattgttataatggatttgcatgagttctttaattgcatttatttatcttgttttggtttggtttttgagacaagatctcacttcgtcactcaggttggagtgcagtggagtcattgcggctcattgcagccttgacctccaagccatcctcctacctgaacccccaagtagctgggactacaggtgtcccccaccatgctcagctaatgttcctattttttgtagagatgggggtcccctatgttgcccaggctggtctcagactccatagctcaggtgatctacctgctttagcctctcaaagtgctggcgtgagccacggtgactgaccttatttatttatttttaatgaacaagtaacagttgagtaatttatggtgtacaatgtgatattttaatctatgaatatattacagaaacattcaatcaagctaattaacatatctatcacctcactaacttatgttttgtggtcagaatgttgtctactcttggtgggaatgtaaattagtatggtcattttggaaaataatatggagattcctcaaaaacctaaaaatggaattaccatatgatccaactttcctacttctggatatatatccaaaggtattttaattgatttgtcaaagatatatgtgcactctcagttaattcttaaagcaacgtactgagatagacattattagtatcctcattttacatatgacagaaccaaagcagagaatagttaaataacttgttcaaggctaaacggagaaagaatcaggattctttttaatattttcaagattcccaagttcaaatgattaaacaatctattttttttttttttttaaattgggggcttccaccttttttatatttgttgttagtgggatttaggacatatcatccccaaatatggcaccttggcatttcgggaaacagcggaagtgagaaagtctctgaccttctgccaccattttcctctgaagcagatcagaaaagaattatctggccttgctctgaagtaggccataagacccctcatgtgtcccatacctaaaggaaaggaatgtcacactgggacacagagaagactgaacaaacaggctttgctacattcccccccaccccaactttattaccattagattacacccttttgttctccaatcatacttctgccaggttgtccactcttcatcaaatttagcataaaaatacacaggtctcccctttttctttaggtattcatttctgaatgctcctgtgtcctggtatcatttgtaaaatttatattaaatacatttgtatgcttttctcttgttaacctttcttttgctataggggtctcagctatgaaccttgtgataggcgaggaaatcaattttttctcccctacattgttcacaatccaatttaagagaaaaagtgagcactcttgatgatccagtaccccccaaaacacacagacacatgcagaaataaaacaaaagttttataaaaggtggcatttttagtatatgtagccacactttaataattttatttcattcttttctatttgtttttttttttcctttttttgagatggagtctctgttgctcaggctggagtgcagtggcatgatatcagctcactgcaacctctgcctcctgggttcaagcaattctcctgccacagcctcccaagtagctgggactacaggcacacaccaccatgcctggctaattattgtattttagtagagacggggtttcaccgtgttgcccaggctggtcttgaactcctgaggtcaggcagtccgcccgcctcagcctcccaaagtgctaggattacaggcatgagcgaccgcaccagccttctatttgattttttacattaatggcagttatgacacataaacgggttgtacagctcacaaatgtcttgacctatagcttgaagagcatttgtctaaatgacttgctcaaactacttactcacaaatccgggttctaaagttaggttttttggtttaaaaactgtaggctttttcctcttggttttataattgtgtcagtccaaaaattcttcatttcctaacttttctccatattagctataaatcagaatagttgggaactaaatgggagctttgccaaaggggcaatccccaactacaatgcgttggtctaatattcagtaaaatacattgattttagtaaaattcactgcatattttgcattttactcaaattcaatataaaatagacagtttttttttttttttttttttgagacagagcttggcttttgttgcccaggctggagtgcaatggcgtggtcttggctcactgcaacctctgcctcctgggttcaagcgattgtccttcctcagcctcccaagtagttgggattacaggcacctgccaccatgcccagctaatttttgtattttagtagagacggggtttcaccatgttgaccaggctggtcttgaactcatgacctcaggtgatccgcccccatcggcctcccaaaatactgagattaccccacctggccaacagtctgttcttaaagaaagaaaattaaaataaatataattactagattcagtgtacattttacttttgtgagtatcattcaggaattcttacctcagaaaacctggaaaaggcaagttatttagaaatatgaagaaatcagggtgttttattcttaatgaaagcatgcatcttaatttatctttagaaatgactgggggaagttgattatacaatcaaaatgattaaaattaggcatgtagactttagtgcaagcaaatctgggccactcatttccaggtacatgaggaaatgtactagcacttcttttattactatagctttgaaggcagcgtgttgtcttacttcccattgtttggatttttaaactgataattaaattcatttgcatcactgctgcttggattacaaatacttaaaacaattagttttctgtcagatcacagatctacatcaaatagatgttactttttaaagaataagccctcaccaattagaatgattcaaaagcttttgattgttttctccaaattgttaagtatgcatttgtctttaatgtaaataaatagacttaatggcataaaaagccattctgaattttaaatgaatgacaaaatgtaaatcatgttctggcataatagttttgccaaagtttcaagaaaagaaataggagcattcacaataagcaattgcaagctgtgaaatggcatattaaaacagaggattaagttatttttctagttagtttttggggaaaaaatctccagtcttgcagaaatggctaaataattgcatttggtatggaggctacttttggtcaaaattatgttaataaatatctgagttcctcacattaaagtgaagcaagaatctgtggcatttttttaagtcataaaacatttgtatgttggcttttagatagtaacaagatggcatccatttatctgtatgcttctgcgcatacaaccttatatgacatatgtaccaataaaaaaagtatacatgtattagtaattaaattctagacttgtgctgtccaatttggtagccattagacaatggcaaaaaattattttgaatttaaattagtgaaagtaaaagaaactatgttgttcctccattttgctagctacatttgaagtgctcagtagtcacatggttttagtggccatcgtgttatgtagtgcatgtatagaacattttttgttttttatcaccaccaaaaattctaatggacaatgctggtttagctcttcagtattgcaaactttagcctttaaaagctatttgcaattatttagcgtgtattgtttatgctccaaaatactttcatctcaatgtagaaagaaaacgattgcacttttgaatataagagaaatcaaatccttgatttttttctacataaaaacgtggaatttaaactgaattatttaacaaaaatcaaagtaccttagaaataacctgaaaagaaaaacaaattttagataatatatataattttgaagtagaagaaaactaagataaaacgtactgcatttgtatacttttatagttttctaattattattataattggaaaaaatgaattttaacaaattaggtataattatcactgtggtaagcagtctccagaatggtcccaaattaaggttgtctgattacggaataccatgttcttttaagtccagtaatcccaaccttttctaggataaagcttggtatatggaatcaagatatgtattcttgttattcttctgttaccattactgctgtgggtttcaagaacaggcacatacagtttctccttgtgtgacacaaaccttgtgtgaatactttttggtacgctttcaaactggggcagcactagatgaatgccttttccctaggtatgcctttcagtaaactctccaggtgagaggggtgtagtaagtactgctttacatggatctaagtgacatgatttgatcacagttcaggtggttgtagttatgaaccatttcatgttaaattaaggtttaggggtttattttctaaaataatgctacttacagtgacagcatagcatagaatctacaagttctaaagcaactcaataacttctcttaaatggcccttattattttggattagcattttggatgacaactaactccactccctctcttgaagggaaagagatttggtagaaataattgaatgaatcctggattaatctagaatatgattttatcaatgactgatgaattacactgcactcagttgataacggtgtcttcttctcttagaaatgttgagtttgttcctattattatttcaggagacaaagctttttaaaagagttggtcaactgtagctaggcatgaaagcatggtctctaagaagacacttataattccctaagtatttgattaaaaggaaaacaagtacctcaaaaactcttaagtttatgttataggcaaagaagtccccaaacaatttagtcaacactctgaaataaactcttaagagtggtgattttcacttggcattttggagattccatgtgtggcaatgtgctcctcaatcaaggagttacatttctatgtgcagtaacattgcagttgcacaattaatacaaaaacaaacatatattaatcaatgacaggttttctcattttcatacagagttatgaaacctttaggctaaggaacagaatagtgagaaattagacaactattaataataggattaattagattctggccctacagctaagaaaatggagtgacaatcagaataacaccaaagttttgcaagttgtccaagtgacaaaatacaactaattaatactaataaactaaagtcaaattggactctatttacacaaagtactttttatatacaggcaaaaatttaagtagaaaaattatggcctcccagaactaataccaaaaatttaatggtaagaaaatgaacgtattcatttaatatataaccacatcatttgaaaatattgagctctcattgtaaagacatgacattttctctaaaattaatatattccataaaaatagtttttaaaagagaaaggctttgtcttcattcttttcgtgtgaaggtcaaatatcttagattggaatttaactgcaggaattatgcttctgttcttactttagcaacactaacgatgacattttctgaagtacatattgttaacaccatcatgatgaaagcaaatcatttttctacacttactttgatgctaatcagagcagtcatttaagttgctacatgactctgagacagaaatttcaaaatgaaattgaccaccgattcccagacaaaaccagaatagtggtgtcagatgagaagggttttgcagtgttttgtcacatttcattttgatttttacttttttctctgtttgacatatgttctgaactagagtgccataaagttttatcaccataagtttgaaatgaccacattactcatgagctacagagtcacaagtgagtttttagcttctttcaaagctgtagaaataaaactttatagtaccctaccctggtatatgttgttttatgtgacacattttgttccactttattcttttcttttatttcccttcattattttctttttgaattatagcagaatttgtattaaatttttcctaatacacaacagtttaagctacattttataatatcttatgtatttttttcatacagattatctttgacctgtaatgcccatctcttaaagaaattttagatggtcattataaacaaggttcattgtgaaatatatttctgttgaaacactgattttattacaaaaaggtaatgtttgatttccatgagaaccaaaactattggttgagatatgaaagatgaacatttgcttccctttacacaattgattaaaattcttaatgcatacatagtcacactacacaattagtgtagtacatacatatccgtataacttgagtcttccatgtatatgttatgcaatagaacttctacaaagacatcaatatctcatgctgaaactatccaaactataaaatgattttaggattagcttatcccaaagggaaattgtgagcaatgtggctggcctgacagcctgaagtgatatgctcagagtggatctgataggcagccattcatttcaagctcaggaagcaaacttattattttgtcatacacggtcgtttttccattgaagacattaagacggtaaagaaagtcctcagagtctatggaaaggatcaccagactttcattttatctccagatcttgaactggagcttttgaagattccattttagtgatttctggaaggctgctaatcttaatgaataaagtcagaaacacatgtgtgtggctgattcagattccagaaagaattttggttgctatcatgattatttttaaggcataagtgattaacgctgagatatactgcttttcctatttgtggattaaatttcttctatcggagaagttctaattgaaatgtctccattcaatgtggttgtgcacacacacaagtacacccatgaatgatattttacatatgtaaaaaaagaaaaccgatattaagtaacttctacttttcattatgagacatgctgtgtgtgattttatatatatatatacacatatatatgtatatatgattttcctgtgttttgttaatcattttttatcattttataatttttaccattttcatcattttttattgtgtggctgatatatactagatattactcactcagggaggatacaccctcatctgggcactcttttatacaagttatggcttttgttttaaataattcatctaagtttaatgaaagaaataagtgactgctttatcctagagaagcagcaaagagattttgttcacctgtgcctttagagactacatgacagcctctacaagtagcagggtagaatcaggttgattataaaagccttcatttcatgctaaatggaaaggagaaaagaaagaattttctcctttaattagaatgtggcagtttaatgacagaggcactattgttgtgggttaacatggaatgaaatcaattaaataggactatgtatacttaggtgtctgtaggaatcaccaaaaatgtaactctccaacagtttgctgaatctgcctctgttttgtctggctgctatacttggtatgtgggccatctggctcctggattccagtaaggtttgcatattcacacatcaatcagaagtggtgtagggcctattaggaagcaccagccagttaggtgacatgccaggactgcaaagcactcaagcaggaatgccaagtggggagcttctgctgaagctgacgctgacacgggcattggaggcaccttttgatccgtctagctttactgttgatgtcacagtcctgctagatcaggcatagggatgtcaggtcacgtaaggcctcatttatgtcattggttttgcctggataattcaaatggagcaaaaataaaagtgatcttgatccttaggtcccatgacttttgatagtagaaggatcattgatctgaaattgtcttgcattcctgactagtagacagaaagatatcagaagcaactttgtctattctgtttctagaactatattgtgggtactagtttttcacagtagtactagacatttcagaaacagctaccgaataatctttccaaataaagggaaaggttgtaataaaatgcattcccattccctatgtcttctcaaacagttcactgaaacttaaagggatgagcacactttacaagaaatgcaaataaccttttagttcactgaaataagataaacaacacatgtgtgtatttttaattggaagctctatcattcagttccttgaactaacagctactatacttttcttttgatgtatgcttcacagatatccattgcaagttttagattgtttgcttcaatgtagataagacaaattaactgaaaacttaaaaagcacctagaggattggttattttaatgttttttagacctctggatgctttgatcccatacagaataggatgaaattccactataatggcattgttttaaaatttgaattggccgtaatgtgttgtgtgtgcacacatttatctagctatgaacacaattaatactcactgagagagctctttaaaatgatgacataatttttttctttgaaaagttatttcttacgccctaaatttctaaagtcaccaaaaaaaggtaattttctatatgtaagacttatttatagtaactaaatttctaagtaactgatatctcctaaacagaaatgtctaataacttacttctagatcagctttaacaatggttttgatttatctaacttagtgcagtaatacaaatattagtagtaaaataatacaagtttaactaacttggtataataataggaataatataattgctcatgtttgatgtatgctaactacttggcaccattaagtacatcacatgtattatttcacttttctcattaaaatagcagtgtgatgctattatctccattttacagagagggaaagtgaggcatggagagaagtcgcaatttagaaaagtaataagtataatacttattttaattttaaattattctttgctagaggaaagatgcatgttccttggacatcttctatactttaataatattatttctatgtttctagcaacccccacaatgaaaagcaaatacacgatgcctttgggggacaaagcagttctgtagtcaggcccacacatgaagtgttttacctttataggtttcaacaattaattggaataagctattttttctgttttggcatctgtctacttggcaaggcccccaactgtggtgttggcagctgcatgacagcgactgcctctggtttttccacagcaactggctgaaactcgcctccctgggctgtcctattatgttgaaaattattttctttgactcaaatcagaagagtgtaatagaaattgtgaaaattcctgacatcttcccaaagatgtttttgaaataggttaaggttctccgggagtaaacttggattctaaatatgattttttttttctgacagatgtatgcatgtgttatggtaggtattcagaaatgaatgctctcatttgtaaaataaaataaaataatcccaaactcttaactatagcaatttgtggttttaatcgttttcccttgtaaatggaaacttggtaagttttagagtgcattgtacatgataaaatacatcttatgtctaaaatcttagaaaatattatcttgcattggggaaaacatcataatagtgcatatgtgattcattttatgtaaagtcctaaaattatctaaattaaaatatctatattctatagctgtgcatgtgtgtatgcacacacaagaatatacacatctgcattttatatagatacaagtatattgaaaggatgatacattcttatacagatgtagagcttaggatttctttatcaatataagatagaaactgcgaaagcatgaaaatgaaattaagcatacttcctttattcacttatcacccgttttcagaattagttgccctatgggtaggtaccttttaaattatattgtacatctttcaattaaatatcgggaggttgaaaattaagtgacaattctaatatttctagtggaagacctgaagctgcactattaaaaagctagtaaatggaaggggaaggatatttctttatccatggagttaattacacaagcagtacactatgtaagtgctaggagaaaaggtgatacaaacactacttaaaaggtttccagcgagaagcagctctgaacaaagtagatttaaagtgttacctccttactcctacaaattctaatgggaatcaattatgttccatgagtaataataataattaatatttatggaagtgcttactatatgcttggctctgaaataagggcttcacatattatagcacataactatcctaagtagaagatactatttttacttccctttttatagatagggaaagtaaaacacagaggtgggccgggcacggtggctcactcctacaatcccagcactttgggcggccaaagcgggtggatcacctgaggtcaagagtttgagaccagcctggccaacatgacaaaaccctgtctctactaaaaatacaaaaattagccgggtgtggtggtgggtgcctgtaatcccagctacttgggaggctgaggcaggagaatcgcttgaacctgggaggcggaagttgcagtgagccgagatggcgccattgcgctccagcctggggaacaggaaggaaactccatctcaaataagtaaataaataaatagcacagaggttaaataactctcctacactcacacactccatgtgtctctggtgatcacttggtaccacttcttttcttgcatgtctcacctctcttataaacacattaccaattttaaatgggtgttatgaactatgtgtattaattatggctgagaaccaccatttttaataacatggaattttctttagctggcagggaaggaatgcttccagtttaaaaaaaacggtaaaggacatagctttaaacagaaaagacgctttgaagataagttcatgtccataaagtccattcaaataacttagtaaattgctgataaggtcatatcatgtagcattttttaaaaataagattgctgaaagttcagcttgctctgagtaaacacagagcaagatgattctcaattatatagtgaataaaatcaataagaacatctagtgaaatccaaacagaaaataaaaaaatcaaaattgacttttaaaaaaattgacattttatggagataattgtagatacatatacagttaataagaaataatacggatatcctatgtacactttaccattttttccctaaagttaatattttgcaaaactataatataatatcacagccagaatattgacattactacaattcagcaattttattcagtttctctcggtgttcctatatgtgtgtgtgtgtgtgtgtgtgtgtgtgtgtgtgtgtgtgtgtgtgtatttagttctgtacagtttcatcacatgtgcaggtgtaggggaattggatatcacctccaatcccccttttagttcttagtaggctcttcagttggatctagaaaccaaatcgacatcaggcagaaaacaaaagaaaagaatacaaattgtattacttatacatgtacgtggagatcatcacaagaaagtgaagcctgaagaagtagtcaaagcaagatgcttttaatgatgaatgatgaatttgatgaatttggaaagcaatgacaggataaagagaatctggctagggacagtaaattttctctaggggagtcactaggagatagatagtgggtataaaactagtgaaagataagggttacttcagtaaatatatttattcaggtccattgaagcctccaattctaagtctctggtaataagggctattttctcactctggtcctgtgagggtgcccctcccagaggaatctttatggtttgctgcatgtaggaagagacaggtgagctaactctttctgaaactacaatttctccaaagtttccaactgaaaatagccaacataccaatctggcatatttggggatggaacatcctttactccttcacaggtatctgtggatgagagctgaagcaggcccaccaggaacagagagtgtttccccttactgttggcaattctctggattgcatctacccatcctgtcctagaaagtgtcaggagaacctgatgttgtctcagggaatcctcttagatgtggagagataagcctttctaggctgctttcgactgctggttgtgggtctcgaaatggtgagtctgggtcacttgcttctattaagtgaaaagatgtaagtcactcaacttctgctccagacccagtaaaccaaaactccgtcgtcttcttctgactaccttcagagttatcttgggtttattcctgcattattaccagcatttgttgctgttttagtgggaagaggaagggaaaaatgggtcgaagttatcttacccttaccagaagttcctaaatagactttttcatgagaaagaatatttttaaaaaactgtttatattataaatattcttggtagtttttttgctgttacatattttttaaaaatccatagtgcagatataataaaaactattgcaggtatttaaattaacagaactagttgaattcctacaacgtgtcatgtacagtgctaggttggttgatctgtctgtgcttctgctttacttggaatggatgagcaaaggcttatactaatttgcacttagtattataatgaggtgtgagaaaccaattttcatattcaagtgtctataaaaagtgactatttttcaacagttagctcctttaattataaaatcagtttttattaaaggcagttgatgctttgtgtgttgttgctagggtgacatatattatagaaacatacagtttatctttccagtaagagggaatacagtctctatcttaccgttaatactttaattagagaatgatcgacagaaaaatcttttttctcttcatgagatttgaaaaatgcatatcttctttatctgcatttaatcaaccctgggttcattaggatttgttgtgttggcacctgagaacatcttagaaattattaaataattcattttctgctttttttctttattttttatttccagcagaggcttgtattaaggagattctcttttgacatacccccacatacattcacactaatatatatgcactattttcaactgacatgttttagagttattgagatattaattttataggatactatcacattttatagctcttagtaaatagtatggtatttcaaaacataatttagttatagtaatagaaataatccatcatatttgttgtatttataaaatgtcttcaaaaatatcatataaatgatatctgaaattttgtcctagtcttgcaaatgctaggggattaatattaataaggttgttgtcaatataaatttctagtgagatgctcattaactggaaatccagtgctagagagacatttcagaatacctaaaccttatttagagacaaataaacatactagttaatatggctattgctatgaaccgcataaaattgaaatttgcccgaactcattcagctaagcatgctaacctcggctttggaaaagattgaatggcctatcatcagtcaatcttggtactagagttaaaagaagaggcaagtaatatggacagcacaaggaaaatgacagaaatagcggcttgtgatgataattagcaagaagtttgaataagcaaactctaaagaatattgaaaatgagacaaaaactgttaatgtatatgcaattaaatctttggaccctccttgcttgttgtttcaaatatccaattgtggagagaactacgctagggtaataatattgcccgttttccctgtccctccatgtactccaattaagaaagcagaaatgaaccatctaccctgatttttggaggaggaattgagtaggtatggcttcatgctctttaaattggggttaagcccccatgatataaattatatagggaatgcttcttcttccatttaatgcttactaatggatgtcactaggcaaattattagcaaacatacataataagaagacttaatgctatgttcgctgataacagctttatcattagtaaaggagatattttcatctctattcgtctgactcctatatgtgcggcttaattgattacgaacctaggtggggaatagatttaataattttctcaaactccatctataagtaatatgaagacatgataaatttttaagcagaaaaatgaaatgaaaaatattatgattcggaaaatttgtttccttgtactatgaaggatacttgggagcaggttggagaagagggtgaaggaaccgtttgggggacgcgtcagtaaaactggtggtagagactaggctgaaggatgatagtgggaatggaaaagtgaagacatttgaagggaagaagacattgtgtcggagttctaacgatgttcatttgtgcataaaacttgcatttgtctatcttattgtactttatatattcttcctaataccctgtactccattttactcctttttttttttttttttttttttttgagacagagtctggctctgtcgcccaagcaggagtggtgcagtggcgcgatctcggttcactgcaacctccgcctcctgggttcaagcattcctcgcgcctcagcctcccgagtagctgggattacaggcgcctgctactacaccagcctaatttttctgtttttagtagagacggagtttcaccacgttggccaggctggtctcaaactcctgacctcaagtgatctgcccgcctcggcctcccaaagtgctgggattacaggcgtgaaccacctcgcctggcccctgtaccccattttcaatatggcaaatggaataaatgtttttacaacatttatttgactgttgtttataactcttcaatagctgtccattactgtaaagtttatgccacaacctatagggctctaccttttaacagctatctctttctgattttccacttctctccaacctccctccctaaattacggtgatactgattttcttttaaaatacaggactactatcagcctcctttttcatcttttaggccacaacttaatgtttcttcctcagagaaatttctaaaggacccaaacccacaatagcttctatatgagactacttctcccattatatatcttccaggtatcctgtaatctcctttacaacagccagcagaattgaagtacactatttgtcaaccaaaggtgtgaagcttcttcttactcctggtgtttgtggttttattgactcttctttgttttctttaccagtgagatcccatctacatctttcagtattttcaccagtatcttggtcttttgcttgcttgctttcttgttttctaggttgattataattttattcctctaaacacatgaataccttccgtcattccaatggaattttggacaaaagggaaaaagttataagtgccaatttggttgccatgaaccaaaacagaaaattaaatacaattgcctagataatcaggcccaatttgtattacctagtatgaaaaacactttggtaacaacagtaggtcatgttaaactaattaatttctaggaacattgataaattaaacattggttactctccagagtaactctaagcccagaaaataagtgacttgtacatccatcatctgattcaggttcaaagagagtttctttattttggcaaagccaactttactgaaatgagatgagaagatttctgttgccaatttataatggagattaaaaataagaccccattgtcagagttggagatcatatgttggtaattgtggttttgtacaaaattaagaattgatccctaagaacttgtaaattataaagactttgtttagctcagtcacatttgcctaatctaagatttctgtctaggagaaataattttctagatggagtcaactagtacacctagtttaagtcttctttatgtgagattgtgtttaaaacagtgactcttttggccatagttacaatgagttcttcaagggttgtgtatttgcagactatcagtggaaagcacttgaatggcaatagttggaaattttgaagcaaaggaaataaaattgttacttgaaaccttgtaaaaagatcatacggccgggcgcagtgtctcatgcctgtaatcccagcactttgggaggcccagacaggtggatcatttgaggtcaggagttggagaccaacctggccaacatggtgaaacccgtctctactaaaaatataaaaattagttcagtgtaatggcgcacgcctgtaatcccagctactcaggaggctgaggtgggggaatcacttgagcctgggaggcggaggttgcatcgagccgagattgcaccactgcactccaatctgggtgagagagtgagaccctgtctcaaaaaaaaagataaatttttaaaaatccatgcaaagagcttgctattttgctattttagggagggagcatgagcttcatactcacttggaatttcctgagataaaggcagaaatagaattggaaaatatttaatataaatctgaaaagataaggcatttctcttagaagaagtttctaagcaaggcagctatatagcaaagggtgaggtatatatccctggctgcctcttagcacagggaactggcaccacggggcctacactggcccaagagttcttcaaagataattgtgttcccacaacttttctctgtgtagtaaactcttcctgccctgtagcagtccgcccagttcatgaaaaccatgggatttgacccactgaagaagacttttctcttaaagtttttcctgtttatccaggttttacccagtaaaggtcagctataactggtaatagttttgtcaatgtttccataccttgggacaaagttccttatttgctcggtatttcctctcaagttttacttggcattttgaaatttgaaaaaaattctatgtttttcctggctgtgaaaatgtattttttctttagtatttgatattcaatttataaaataagacttaaagcagctagatatttgcccatcgttatgtttagtggaatgaagaactaatcagctactactagtcttgttccaattaacattctattcctccatttccttcccacactgatatatgtacatatatagatatcagtgtgatatatatatatatcacacatacatatgctcatatatacatatatatcttatataagtctttgacctttctaagggtcaaacaccatgtttttcacaatctaggcaagctgctacaaggaaggaagagtctattatacacagaaaagctgcaggagcacaattatctttgacaatacaccttatattggtattttattttttttctgaaattactctgggttgagtcttatatttagtttctaattgtgaaggaaagccctgtaatgacctggtgatccatcttctttagaaccaagtcggccacagtcctaaaataaacatctgaaggcataggaacatttacagatgaaaatcataatttaatcaattgggtgtattatcttattttctaaatatgtatacattatttctttttttcttttttgtgagatggagtcttgctctgtcactcaggctggagtgcagtggcatgatctcggctcaatgcaacctccgcctcctgggttcaagcgattctcctgtctcaacctcctgagcagctgggactataggggtgtgccaccatgcccggttaatttttgtatttttattgtaacagtggagatggggttttgccacgttggccaggctggtctcaaactcctgacctcaagcgatccgccccaccttggactcccaatgtgttgggattacaggtgtgagccaccacgccaggctaccgtgtttcttttaaaaactttttttcttctatgtaccgtataggttttaaccctgtaagactgaacaccctcttttgtaagacatattttgtaatactcccattactatcctcaaagagaatttaccaaaaatgtaacttacatatatatataaaattctaaaacaattaccttgtaaaaaataaatcaaaggacaataatgaattaaaaataatggatatatttatcatcaataattaattattcaatatgaaaataagaaaggtacatactgctctagataaatgtagtacctgtacctaaaaccacagaagtagacagctcgaaatgctgacgtatgcaggtgagtggtatgaatgattaaaatgccatgaacagcatattttaaagtaatgggatttttctgtatgattaataacatttggtaaagttctgaataaaataagtgcacattttccctttgatttattgtgggatagtttcattcttggaaaatgcagtgcatataaagactttgtatttatatgtaaaattgagctaggttctatatattcacatacttataaacaggctgtcccctacttttcaaaagctgaataggacatgaaacaattactcattttcctggactttcctgcgtgttactggatgtctggcgtccttagagcacctttccatccgttatggggacaatcacagtgctttcacgtttcttaaatgtacccagggtatggtggtgtgcccagttgagaggaactgcaagtgagggttgtatttttttttttttgagacgagtctcgttctattaccaaagctggagtgcagaggcgcgatctcaattcactgcaacctccgcctcccagcttcaagcgattctcctgcctcagcctcccgagtagctgggattacaggcttgcgccaccacacccagctaatttttgtatttttagtagagatggggtttcaccatgttggccagactggtcacaaacttctgacctcaaatgatccacctacctcggcctcccaaagtgctaggattacaagcatgagccaccgtgccaggccagggattgcatttttgcatcgaagtagcagaaactagaaccagaggattttaactttctcatatgatggaatctgaaggaatggagtctaaagcaagaaactggccctgtgatggcatgaaaatcccaggcccctttgatcttcttgctcttttacaccttactatcattctcatgcttgtcaactcttggttgcaagatgatggtttcaacatctccagcctcaagtcttacatttcagagcagaaagatgaaaaaggaagcaagaagaaggaagaggcagcatgtacatcaggaaaacaaaactatcccagaaatccctagctgtcgtcctctcagatgccaaaaggccatgactgggtgccagagatgcttgaaatagagctctttgttcttgcttgacaccttgctacttctaaacaaaatcacgattttgttgttgagagaaaaaggactcctccctatctacttgtcctgagactgcttcagcctctcagcttcctagaccctcatgcagttgatttccaattcttccaggagctggcttactgtctactttttcagggtttcaaaaaaaaaaaaaaaaaaaaaaagcattttttaaagtttaaaaagcaaaatgtggagtgaatattttttggttactatgctttttaaatttttagaatttgtttttactgtgggttggctgttaatagtccatcaagacaactatttctttgctgggtttattggatattgggcaagcaaacaagcaaatagcagtatctgccactggatgtaatcaggaagaaattttcagaaaaaaaaaatgatgcttcaaggtctagataagcagattttccactggttcctgattattctaaataaaatgtttagtcagtggttgtgtaagtttcaaggatgttatagatggctcttgaaaacaataacacattaacctaatattttcagtactcctttttctagcttcatttatcctctcccatgcctgtaaacatgttactttgttaaccaaataaagtcattaatacatgagaccattttgccaaaagtaaacttaaaattaggaggaattggtctttcagaaggcaagaagagaccaagatgaaaggaagtcatttttgtgaaccatatgttttgacccagaagaactatttcacagcctttctcctggtagcaaacaatgagggaaacagtttcttaccatctgcacaataaaacttgttgaatcactcgggaattgggattattgctactgtttgtttgttgttaagccttaaatttaaaaaaagacaggatatataagcagggttggttctaatactgaaataaaacaaaaatgaacaaacccagagaaatctgcttccaaaaagccacagcacaacaaaaagaggtgtaaacatcagaagacctcaagggaaaaatacgtttatttagaaatgggatatcctggggattttgttacagcagctttattaagatattattcacatactgtaaaattcactctctagaagtgtacaattcagtgttttttcagtatgttcacagagctatgcaactatcatcactatctagttgcagaatactttcatcatccccaaaagaaactgtatgcccattagcagtcactccccattcctctctccctctagcctctggcaaccgctactctgtgttgtgtctctatagatctgcctattttggacatttcatataaatggaatcatactatatgtggcctctagtgtctgtaatctttcattttgcataatgtttttaaggtccattcatattgtagaatgtatcagtctttcattccttttatttgctaaataaaatttcattgtatggatataccaaattttgtttgtccatttatcaccagtttacgggtattcgtaaggcttttttttcccactttttgcttccagtagactttttgtatgtcacaaatggccatatgtttctttatcccataatcagaataaaaattatcattcttttagtggacgtgcctttttttaatcaaggcacagaaataaaaaagtgagttgtattttctcattaagaaaacattttggggtgtgcatgttttcagttgtttggaaatatgtagacatattggcagggtatcccacttacttttgctgtgtataaaatcaccctgatacttagcagtttaaaacaattactttattatgccgtggatgctgtgagtaataaattcagataggacacagcagggatgttctgtttatgctctgcaatatctatagcctcatctgtcaagacttgaaagctaagttggactcaatggctggagggtggaattctgaaggcctacatgtgaacttgctatgttgtttggcttcttcctagcatggtggctttacgatactcacacattttctatggtaactcagggttccaagcaaacgctgttctagcaaacaaggtagtagtcatatggtcttttatgaccctgccatggagggcacaaaacattactcttgccatcctctatctgttgaagtagttacaaactcacccagattgaagaggaaaggacatagaccctacctttccatttgccaatgagttttgggaccatattttaaaaccattgtgccataaagggcatgttttatgacaggtgaagctttacgtcttaaaagtatataattacaaatgattaaatttaaaatcacgagaataaaccattgcattcatctaccatcttgccactaaatcagaatcagtaaaacaaggtcaaattgactagaagccacatatagttgacatttggaagaatttgacagaaatatggctcaattggagttactgaatttaaaccaaaacgtttggcaccaagaatcatgggagcccagactaaagaggaaacatacattatatagctcttattatctaatggtgaaaatcctatcaaatctccacaaaggtggtgaactctggtcttccatggcatcctagacaaactttatttacaggcatgtatggtatataaaataggcatagataataaatataataatccagaacaatgataaaacagctactatgtcaaggtaccatcctaacctcacttataatcaggcattaaattctcataagaatcctatgaattagacaccattattatccatatttaacatatggaaagaaactaaagtacggagatgctaatgaacttacccatcgtcccactaataaatgttaaagtcaggatttgaacctagatgctcaggctccaaagcctatgctcaaaactcttgctatgtgaatactggcatattactgaataaaatagccccagttttgtttttaaataaaaaatgttgatcaatttttttcaataaaatattgtttcatcacaataagacctacttattttcctcctgagcagtttttagtgacatcaataacaatttttttaggctgggcacagtggctcatgcctgtaatcccagcactttaggaggccaaggtgggcagatcacttgagctcaggagtttgaggcaagccagggtaacatggcaaaacctcacctctataaaaaaaatacaaaaattaacagagcgtcgtggtgcatgcctgtattcccagctacttgggaggctgaggtaggaggatctcttgagcccgggaggtcaaggctgcagtgagccatcattgcaccatcgcactccagcctgggctacagagcaagaccctatcttaaaaaaaaccaaaaaaattataagcgagtcatacaagttcttcacagcttttcattatggtaaaccttgattaaaagccaaggttataaatgtaatttttgctaagtgcggatgtattgtatctgtagcaaactgtaattcaggcccctgaatgtaacatcctagctctcattccttttgctgtcagatttccctatagataacgtctacatctgctaccttatctactcgcaaatatttatgattttcttccatgaaatttacttttctcccctgaacctgtaagccaaatcaagtgaccttttgtgaatctcaaacctctgtgaattttaggtagatttaatattcttggccaccactttctattcagtcaaattcaagaattctataaagttaaatatatatggatgtgtgcacacatatatatatatgtgtgtgtctctaggtcatgaatcttttaatactatagaacatagaacatagaaaattataagagaaattaaaatatattgtcaatttaaaagcataccgaaaacatgttatatgagaatggaataatacaaattattggtatggggagaagaatcatgaatagtttcatgaggaatgtggcatgtgtaacaggcattaaatatgattaagaactaacactgagtatatacaagttagctgtatcaataaaaatgtaaatcattcagcaataaactataaagttatttttactccataagggtttttttccctgaaattttcggcccaaagtgactgttttttcttcacatgccacttatatagtgtgaccaagtatttagttaaaaaaattattctccagtcaaatcatttgttgtacacttcttggagctgtggcttgcttgtgtttttattgattaaaaaatacagcacaatcttgcacctaataaaaacctaacaaactggctgagtgcggtggctcacgcttgtaatcccagcactttgggaggccaaggcaagcggatgactggaagtcaagagttcaagaccagcctggccaacatggtgaaaccccatctctactaaaaatacaaaaattagcctgacctggtggcaggcatctgtaatcccagctactcaggaggctgaggcaggagaatcacttgaacccgggaggcagaggttgccatgagccgaaattgcgccactgcactccagcctgggcaacaagagtgaacctctgtctcaaaaaggaaaaaacaacaacaataacagaagaaacccagtaaataataggaaaaaagtgaatatagaaaagtaatagaaaatggttgcctttgtgaggttagatgtaaccaaaatattttagcaattgtttagaacaaatagattaaatgaaaaatatttccattaatattttaaactgttaaattctgtctaatttcacatggtagatacacattcattaagacttttcagtgttaagactaaataaagaaaaagaaaattcttcttattgtgccttattcagaatccactgaatttcgttattatttttattatcattatcattatcattatcagtattatttgagatggagtctcgctctgtcacccaggctggagtgcagtggcgccatcttggctcactgcaacctccgcctcccgggttcaagcgattctcctgcctcagcctcctggggagctaggattacaggtgtgcgccaccatgtccagctaatttttgtatttttagtatcttatttttgtgggtacacaatagatatatatatttatggggtacatgagatgttttgatacagacatgcaatgtgaaataatcacatcatggagaatgggatatacacccctcaagcatttatccttcatgttacaagcaatccaattacactcttttagttatttttaaatttacaattaagttattattgactatacttaccctgttgtgctatcaaataggtcttattctttagcaaagcatatttgtaaagagtttggagtttctctttgctttacacactgtaaaaaaaaatgtcaaacaaggttatccaaagagtagtaggagaatgagcattgagatcataagtgtctcatctgatcaaagttattcaagaatgaatgcattttggaggcaagagttgaggaccatcgccatcattgactatggagtaacacaagcccagactcttgagattaatttggcattatctttcaaaattaaaagtataattacatatttacatagcaattctacttcaaggagtttgcccttcatttatgttttcacatgagtaagggtttagatggacatgggttttctttgtagctaggtaatagtaaaataggtaatctaaatggacatagcttggtggtagtccatgcctgtgccctttatactacagttttaaacaagagatgaatttatataaacagatgttgaaatgtgatcgttatgtagtattaattgcacaaaagtagaacatatatatgtgcatatgtatgcatacatacatgtacatacatatgtgcatatgtgttctagtttattatatatatgtcaaattgttctatttgtatgaaaacactataaatacatacataataaataaacaaatatgcgtttgtgccaaaaagcacagaacatttctgtttagtctcataccactcattttatagctttatagataggaagaaggtagactttgatggtacttgaatttttatctatgtatctgggcaagtattttatctatgtatgtggtagcatattttatctatgtatgtggtacatacatgttttatgtatatgtatgtatacatgcatatatgtatgtataaaatacatacatattttatctatgtatgtggtagcacgtgagagaatttttgttaatttatatgttatttcacttcaaaaattgataaactgtgtgtgtgtacatatatgggtggtggctatatacatatagatattatatttctgggtggtttataaagagcagaaatgtgttgctcctagttctagaggctggtgagtccaaaagtcaccagcatgttaggtgtcttgtgagcccgcttcctcagtgacgttcatcttgttgatgattcctcacatggtggaggggaaagggagcgttctaggttctttttttttttttttttttttttttttttgagacagaatctcattctgtctcccaggctggagggcagtggcacgatcttggctcactgcaacctctgcctccgggtttcaagcaattctctgcctcagcctcccaagtagctgggattataggcacccaccaccacgcctggctaattttttgtatttttagtagaggtggggtttcaccattttggccaggctggtcttgaactcctgacctcgtgatccacccaccctggcctcccaaagtgctgggattacaggtgtgagccaccgcgcctggcctgtaggttctcttttacgaggcaactaattccaataatgagagctccatcctcgtgacctaatcacctcccaaaaagccccaaacccatctcctaatactatcactttgggagttaggatttcaacatatgaattttgggtggacacaaacattcattcaataacagtgactatactatcctatgttaacattttactattttcaaagcttttgttcactttgtatatatgcatttatttatctttgtagcaaatgaaggataaaaatatcttttggagtattatcttgacatactctccagctgctagggatgacctgtcagtattgaccccttgggctgaagcaattcgatcctctcaaaactcaaattgaagtgagaactatctcttctcctttatttcctttcaccagaaatagctatttcatgttttaaaacaactggaaggtaactgaaaactttcagtggtgttaaatcactgtcagaaaaaaaaaaaaaatctgtttgaaagttggaaacagctcaagtaaagccatttaatctgaccagcataagcagattctgaagaaaatggtgaagaatatcattagcagcaatgcacacagtcatttattcattcaacagatgaacatttgatgaacacttactggttcttggggactatactccatgcctaaaatacaaagatgaacgaagacccaattcttgctctcaagaaaatgatagtctgttaagaagaatttactggaagatagataagtataatactgaaaagtgtgaagaatgaaacaataagatgtgcaaagtacagtgctgtcacaaaagagagagaaataaaagctaactggacaggtcagaagaggcttcacatggcactgtcttgaagaatgcatagaaatattctacaaccagcaacttccaattcagttgaactatctccatgcttcctgttcaaccgagattacattttcaatcttgtttctaaaggaaggaaaaaaagatgagtcatttggtacaaaaaagcaagaacagctatagtctacactataagataaatgtagggtactctttaaatctagtggacgctgtccgtaccctttcagcgctcccattttgtctcatcatctaattgcgtgcacctgaagactttctctgatgggtttgccactgcggggaaggctagaagtgctggaatattgaagacccaagcagcattcttcaggttaataatagatgagaattggatgataaaaactctaaactttttacactcaaataggatgcatgaggcatgtctatttcatttgctagaagtctccagtggcattaagtcccagtcatccatagtcataacttgctcattaatgtactctgtgtgttcctttcttctctatctcacttctctacttcctgttgatgctttctgtgatctccatcacagatcttcctgtttctcacttcctgttgatgctttctgtgatctccatcataatcagctacatggactcaaatttgtcatttaagtctgatcttggggaatccaattttagacattgagcaatggactggctgggagggatgaaagaggagacaaaggggctcctatgttcctggttcaggaaacggatgaataacatcaccagttagtgaataggcactgcctttcagtacctacgggagtgctttgttcagtacatatcctgcccagccaagcactgaagaattcatgaattttattgtaacctaaactgcctgtggcattatgaacctgtgtaatcatgggtagtgttggctttataccaggattttgctagcttgttagcatctccatgtgcatttgcaagaccttggccactcttcagtgttttctactccaatttgcatcattgtccctgcaggatgtttatcactcagacattctgaaatttggactgatgcttgacttagctctgtgattggatgcttctcccagaacctttctcacctctatcagctacgctaatgataatctagacagaggtttccctccacgggtgctgcagctcaaactgtgccctagaccactgtcagtcaacctcttcaatgccactgtttggtgctttgcttggttctttcagtctgcatgaagtcgcagctactcaacttacatccatgaagcagcaaggggaaacttcccattctcagtgttttaatctgttctctgttataaaggaggcatagtagagttgctggaccccaaagagtgacttgtaataaaataattctttaaaatgtatacatagatcttgtatcccagggcacacatttgacatgaaaatggctgttttggttgtaagtgcaggtaacagccatcaaggtgtacttgggactcctcctccactccaaatcttaggcctcattattatttagtttatcctgtctgtatctgcaagatgatttttacgtgagaacactagacttaccccttgacactgtgctttttgcagctcctcatatttgatgggcatgaaagctaatatgttgtctaattatggagagttttaagttattaattttatttttatcaggagatccttaaccccctatacaaattagatctaaatagatactaaaagatgaagttaatatttaactcctttacccaccagatgtagctgaatctttgcattggacaagtgagaatcctacttactctgaatcttagatactttgctttgagtatgattcaatgtcactgttgctacagaagtataaatgatggttatttatgcttgcatgttttccagaaagttaaagactattttattatattggctttctgattacttgactgaagttcataaactaacaaataaaaatctaaaaacactctctggggacctagacaaactataatgattaaagcatatagttactttgaagccaagatgaggtaaaggggataacttaagacatatttattcttaggctgacatatcttgtcattattatgttacaggtgcacatggaccatttattttttctcttatgaagaatttcaaacatatacaaaataaaaaagtaacataatgcataccatacactgctcattagctctaaccattattatcattaccatctggtttcctctctacctacccacttcctattctctgttttgaggcaaatccccgaaagtatatcacttctactctaaacatttcagactgtattcccaagtaacccccccaccccacttcttttttttttttttttgagacagagtctcgctctgtcacccaggctggagtgcagtggcacgatcttggctcactgcaacctccgcctcccaggttcaaatgattctcctgcctcagcctcccgagtagctgctactacaggcatgcgccaccacacccggataatttttttgtatttttagtacagatgggatttcaccatgttggtcaggctggtcttgaactcctgacctcaaatgatccgcccaccttggcccctcaaagtgctgagattacaggcgtgagccaccgcacccagccccggaaaatatttgcttaatatcatcaaatacattttatatttcccaaattatcctataggactcctctcttctctctgttgtctctgtttcctccacaccctacatcctcctcctccctcatcctcgttctcactctcccttttcatttttgaagaaacaggaccttttgtctaggtttgttgattacatccacatgatattgtttaatgtgtttcaccagctcctgtggtgctgacaaattagcagctaagtctagagagctacttgtagtcagtttgattttgttctttttttactcaagatgattgtatagaaagtgttgtgtactttcaacaaaaggtatataacgtttgatattggcagccattgatgatcattgttttgattgattatttcattatgagttgcaaaacaatgatatactgtttttacttcttcatttgttaggaggagcagttctataaagagaactttttgttttgttttgattttttgtttttgagacagagtcttgctctgtcacccaggctggagtgcagtggcataatctcggctcactgcaacctctgcctcccaggttcaagcaattctcctgcctcagcctccctagtagctgggattacaggcgcacgccaccacgcccggctaatttttgtatttttagtagagatgggattctgccatgttggccaggctggtctcaaactcctgacctcaggtgatccacccacctttgctttccaaagtgctgggattacaggtgtgagtcactgagcccggcttataaagagaactctgcatttctatttggttgcctcatagtataattgatacaaagcaaagcagagtaaatgcttcagtttttcccccaaaagaacaattttcaaaataatgaattgcttctctagtctcttccaaaagttgccagtgaattttttttttttttttttttgagatggagtcttgctctgtcaccaggctggagtgcagcagcgtgatcttggctcacttgcaacctccacctctcaggttcaagggattctcctgcctcatcctcccgaatagctgggactacagacgcgcaccaccacgcccagctaatttttgtatttttagtagagacggggtttcaccatgatgttggccaggacggtctcgatctcttgacctcgtgatctgcccacctcagcctcccaaagtgctgggattacaggcgtgagccaccgcacccgaccaccagtgaatattttatttatttattatcatccagttgtttgttttggcatcactgcgaatgcatgaatttaaatatatttaaatgtaactgaggctctccaccttctgtattatgatctttattgtcctcatatttttcatctttatgcgatggaagcctcctttacattgacctcctgagtcctttctgtatgacctttatacactttggttgaccccaacttctcttgtagatcaccagtgggcattcctgaggtgtgggtataacatttatctctggattatttattcattcagaaactttacttagtaattaacatttactaggcgttaacaaggaagcagtaaagcagcaaacatgctcatttcaatatttggattaatacaatcaatcaaaacagtagttattgacaacttacttattgtgtggttagcacactcaaaatttatgcagagaaaaaagatgagagattagacctcctccttactgtaacacattttcaatctgaccagagattttgcttctgcaaatttggatgcctagcattggcatcatcaagactttcatagctatggaaccatcagatataaaatacaccttagtatgcaacctcaacgtgttcttcctcttgcaattgaggttatattaatttattaagttcattttgggataaagaagacagaatcatagttctttcagcctgttattataacactttattatcctttacctccttccaatttttgtgtctaataattcgtgtgcatgtgaactgtcttcacttttgagttttattatgaaactcaaactacaatacacatgtatgcataaatttctgtatatgtggcatgcgtgtatatgtgtgtatgtatgtgaatatataaatttcgttgaatagagtggtatgattgtctttggcctccttaattatatatattagcatatgttctagggctcctgacgcttcttgcaggcagaaggcatttccagaggttgtgtagatccatgaaggacagttatcgggtcacatctcacatcatcactgtttctttcttgcccctgtcttacactagtacccttcagggtattgtatgaaagcttcattggttcaaattcattttgtcctctagtgctactttctatgctgacaaaagcatagtgaaactgatgccctggcttgtactgcagtaatattgcctccaagcatatcaagtacaggaagttaaatcctatatattattaagccagatcagtaacatgtacccaacaatgtggtgagacatattttgttttaataaaacgatgatgttacaaattcttcaaccttcccatatgtgtggaggtgtgtgtgaatgtctgtattaatctaccccatgtctcctggatagagtttttctacaaagaaccaagctcagcttcccctagtgttaagacattttgcttcatgcttggtatagtgtagtgctactcaaacctgagtaataaacaggccagtttaaagaaataaaaagccctatgctcaaccaatgctgattaaaattatttttattaaaatttacctatagaagcacgaatataaaacaaagggcacactctttatggtgaaagggcatatagatctacaacaacaaatcatattttcaaatcaaataaaacagaagtacagaaaagcaatagaactcaaaagcataaccttaatgtgtctgccaatgttgtcttggatacattaaatggccttttataatgtgaatatagtactagctgcaatggtgcaagttattgtatttttagcatttttcaatatatgttgtgaagactattttactgcttttctctattcagatctttgcaaaaaaactcatgtatacactataatcatgttttttgccattttgtagtcctatgcttttgtgtcatcagccttccccagctagaaaagtataatattctattattgtatgctgttgtcattttcccacaatcaaaagtacaaattattaaggaaactgaagtttcggtctaaaatgtgttgttcagatgaaattatccataagaaattaaagttgtgttcttataactggaaaaagaacttaacgcaagtataatatgtgcaaaactgggatgacttagttcttgctatcattaagaggggacaaatggcaacgagacgagctttaacagctgagaaaatcttatgcctagatgtacataggcctggaaattacatagcagtaaaactgtaccttcaaatagctcaaaagcagctcataataactgcttgagattatctcagtgataaagtcagtataacatagtgttttttattttaaaaaggaaaaatgattactttctttacagtatgctaattaaaatatacaggtgattgaaaaaactattaataaaaatcagtaattttgttgagtgggattatgaatattaattatttaattaaaatttccttcaatagttaacaaagatttattgagtttctgagtcaagcattcttctaaaggctctgccttattagaatttttaaatgtatttgcaatgagtgtatattaaatgtaaaatgtatgattcaggtttaaaaaaaaatagcagtgagagtaattgaatgctgaggttaaatagaatgggtgaatcaaccataccataaaaaacttctaagtggatattatattccaggcactctttcctacttcagctgttgataaaatcaaatatttccttagagacccttgactaatgcaggaaataaatgaatacttgcctatatagacaaaataataacaacaaaagccagaaaccaagccataccaaaacgaaacaaaaacagaaaaactgtgatgacataacttatctttcaataggattttctcagaatgggaggcaatatatattttatgcttccatggtctgtagattccaacatttgtataattaacatatacaattttacaagggaaaaatactattcaacaaatacgtaaatacgttcaatgtaatcatgcagtacttcgtttaaattgaccttttttttttttttttttttttacaaatggtgcaataaaataatcatgtttaccttcttcacatgttcattgatgttggcgtgcacggttttatctatatgatgtgaccttttgagaccacatgacattcacaaactgaaactaaaccaactaaataaccagttatccaaagataagcaaaagtggacgtcagtttaattagtaaggggagattttaatcagtaatacactattataatagagaagagttcagcatgaactgaactgaactttgatttgtgtagaggtgactgggagttttaaagggagaatgagagaatgagtttgagtggtggctcattaaagtcagggaagtaacaaattacaaaaagtggaaaggtgggattgttccctgggaaacctctacgtttgctaaatggcacttaaggttaggctcctgccttctcactgtcttcgggttttgactggaacaaagggtaaattattttggcagctttgagttttctcagaaatgcaccttaagtggggctagagttatcctagagaggtggctttgacctgttagaagctatgttagtgttttttgttcaggtctgtgcaggccaaggttatggcctagctgagaagagggctcagaggagcctagctaaagtttggtcaaggggagcgtcttggtggagcctcactcctgttcaagtaaagaagacacattattcatccttctgaacagtgtaagtccatttgtcattcgattgccttttgtttactaaggactagctaaatcatcggttgagacttgctagtagagcatagttgctggatgatgcacgtgatcaggcatttaatgagaggcacctctatggaaacaaacataaaaacaaaaacttgttggagaagaatataaatcctatttgttgagtctagagggcaggcagttaagaagttttctagacattgaattctaagcatcttcagatggtagagtggtaatctgatggattttctggtttatggtttgaatgtggtgatggcataaacattaatttcacagtcatagttatttcctggaacagaacacggatgatgctggagttccagtggactttctgaatggctcttgtagcaggagctccaggcatgaaggttgcctatacgtgatttgttgtggtggtaagtcttttgaagtttatatcaagttcttgggcttcagtgtgcaaggctttttcaaatcctgggggagaaagacagctacaagacaaccttgtaggttgtcccagtagaatcagtaggttgtaggagtcccagtaaggatttgggcagtcagattttaattctcagtgatgtcaagtcaagagggaaggcaaaaaattataaacatcaatttggagagatgtagcccgatattgaaggaaaactaaacaattgagtatttagtaagagtggcaaaatgggtgagatggcagaattcagtttagtttacaggtaaatgataaaatcctcaagacaatgaacaaaattggaatctgataacccacagtggtgtgttttacataaaacacaacaaaaccggaattggatgagaagagtccctggatctagggtcatcagaatgtagctattaagagttggattctgaagccaaattcaaattaggtgccttgtactttgcgcactgaatgctctcaggcaaattatttaccttctttgtgcctcagtctattcatttacaaaaggaatcttaagagtatatatctcataggattgttttgaaaattaatgagtacgttacattcaactgtgtctgccacattgctgtgaagttattaccttcctaatatacttacaaacttcataattaagaaaaaataaaaattcataaaatgaacatatttgtaataacttattataaatattgtatagttcattaaatgtattacctttagacatattaaaaataacacacccctcatccccccccaaaaaattcctgtatgcctgttttaaagcagttctgcatgttaaagctgcatttatgatatctaagaagtgttttttctcctaaatagcaggttggtaataatgtatattgcaatcgtaataatgtaagttctggttacaatagtttatctgggtaacatgtagaagttaagtgaatgaggtaataaattaaccaataagattacctttctggtagggaggaaaaacacttctgggttgaattaatattttgtacacatatgaaaggaagaagaaaaataagaaataccatttgcaaagctgactttaataaattttaattgaatggataaacattttagttaaaggtagtaatcttaacttgagattacttgagataaaaatatatattttcttaagagacatgattgttagataacttagagatataataagtggaagggttttccattaaggtaactgatagtccttaggtaaattaaataatgggaggaacttgtgttaggaaatcaacatccgagttacagttaaattggtgggagtctttccagtgcctgaagatacagagattttcaatagaaataaggtttttctgagaaattaagtgaaataaaatgtgcaatagtgattgataagcactgtttattgaagaaacgatttatctttattcttgccctttgctttttaaaacttttattgcattttcttctatttttaatacactttgttattgaagcataacataaccatataccataaacacagatagctaccactcagatcaccacttggatcaagaattaggaacgaacatatttgattttaactgcagtctcttctctcttacgctgaaaatctatgtttctaatgacattagtataattgcttatatggtaattaccttactatatacatataatggttccaaaataacagttcttgaattatttttataaaacaaaattaacacaaagatttatagtgatttctgcatttattttattattatatgtttacagacattggctaatgcttctgatgatcaggcttctctcgattaactgaagatagccttactctgcagctgtgtatttcttattccatctggagcctatgccatcagacattatgtctgccatattttttcttctgtggaaaatcagttttctttctgaagtgcttatttttacctttggctgctgatgtagatctttcatttgttcttcatcttaggctgtgccctggctctaaaaagtgttctcactgtctctttgctttcatttttttcctttcctatccctacgcccttaaatcacaatatctgtcagagttccagaagaaagaataaatactcaaaggagtcatgactattataatagttgatagtgtttactttggcctagttgtttctagatttgtctcaagaagcaaacaaaccaaggattatatatataccatcttgaccacaaaccaagcctcagattcctctatacatatgtcttaagttaccaatacatgttaactgttataatatttctttgactatatgtatacaccatgtagatgtagactatgtatactttgcatcctgctgtttatcacatgcctggcacatattaggcactgaaatagttgcttaatacatcaaaataaaattgaatagggaaaatataatttcttaagttagcattcccctctctccacccaaaagtattaaataaaaaaacaagagtttacgatgactttaacattatgatagagatacaagaaaaacaaataagtatagtaattgaaatggtgcccagaacaccctctttgttgacactaaaagtaagttcatcagaccaaatctgtactgttcagctctggggaacataatttaaatgagacactgaaaaactggagcctgtctagaaagcaacttataattttagggacgtattagctgttttcaaatattcagctaatcagtggaaatgcaatgaagcatattcttattatgatgagaagaaaggaaagagagccctttgtccactaaatatttaaacaaacaaactttgtaacagtgagagatggccaaaaatataaaaagcttaatctggaagtagtgagttgtttttcactggggtgtgggcaggggcttcatgtctatttaaggaatgctgtgttcccatggaaaaccagcacaagacaaggatgccctctcttaccattcctatttaacatagtattagaagtcctgaccagggaaatcaggcaagagaaagaaataaagcgcctccaactaggaagagaggaagtcaaactatctctgtttgcagacaacatgatgctatatctagaaaaccccatggtctcagcccaaaagcttcttgtgctgataaacaacttcagcaaagtctcaggatacaaaaccaatgtgccaaaatcactagcattcctatacaccaacaacagagagaaatctgttccattgcatctgttgcatgcagtgcaacagggagaaatcagtaatgcaatcacattcacaactgccatagaaagaataaaatacctaggaatacagctaactagaggggtgaaagatctctacgtggagaactaccaaacactcctcaaagaaatcagagatgacagaaacaaatggaaaaacattccatgttcatggataggaagaatcaatatcattaaaatggccacactgctcaacgcaatttattagattcaatgctattcctattaaactaccattgagattcttcagagaactagaagaaactattttaaagttcatatggaaccaataaaagagcccaagtagccaaggcaatcctaagcaatttattagagtcaatgctattcctattaaactaccattgagattcttcagagaactagaagaaactatttcaaagttcacatggaaccaaaaaaaagagcccaagtagccaaggcaatactaagcaaaaagagaaaagctggatgcatcacattacctgacttcaaactatactacagggctacagtggccaaaacagcatgatactggtacaagaacagacacatggatcaatggaacaaaacagagaaccaagaaataagactgcacacctagcaaccatctgatcttcaacaaagctgacaaaaacaagcaatggggaaaggactacctattcaataagtggtgctgggataactggctagccacatgcagaagatagaaactggaccccttccttacaccatgtacaaagattaactcaagatagattaaagacttaaatataaaacctcaaactataaaaaccctggaagacaacccgggcaataccatttaggacataggaacagacaaaggtttcatgacaaagatgccaaaagcaattgcaacaaaagcaaaaattgaaaaatggcatctaattaaactaaatagtttctgcacagcaaaggaaactatcaacagagtgagcagacaaactacagaatggaagaaaatgtttgcaaactatgcatccgacaaaggtctaaaatccagcatttataaggaacttaaacaaatctatgagaaaaaaaaaccctactaaaaaagtgggcaaagggcatgaacagacacttctcaaaagaagacatacatgcggccaacaagcatatgaaaaaagctcaacatcactaatcattagagaaatgcaaatcaaaaccacaatgaaataccatctcacaccagtcaggacggctattaataaaaagtcaaaaaatagtagatgctagcacggttgtggggaaaaaggagcacgtatacattgttggtgggactgtacattagttcaaccattgtggaagacagtgtggcaattcctcaaagacctacagacagaaataccatcaacccagcaatatcattactgcatttatacccaaaggaatataaatcgttctattacaaaggcacatgcacacgtatgttcattgcagcactattcacaatagcaaagacgtggaatcaacctaaatgcccaccaatgatagactggataaagcaaatgtggtacatatacaccatggtatactgcgtagccataagaaagaatgagaccatgtactttgcaggaacatggatggagttggaggccattatccttagcaaactaatacagtaacagaaaatcaaatactgtgtcttctcacttgcaggtgggagctaaatgatgaaaacacatggacacttagaggggaataacatacattgggacctgttggagggtggagggtgggaggagggagaggattaaaaaaaaataactgatggttagtaggcttatatctggatgacaaaataatctgtacaacaaatccccatgacataagtttacctatataacacacatgcacatgtacccctgaacttaaaagttaaaaacaaagaaaagctgtggataggtttggtggacaaactaggaactggagaatatatgggaattttacaatagtctcactggagccttagtgggttttagtagtgtttcaagggccatgtgtagggtgagaagacagtggatgcccaccaccaccactaccaccatcagcattcctttagctgaatagctcactcttcatctgtttcatattgggcttctgggtcacattctatttaaagaaagagtttccactcgactctgaggtccttgaatccaaagtatctctcataggtccttggagcaatcgtattggaatttttaaaatgttgattgaatggcttgaggtgaaaggaacctgttgcacagaactagttctctgttatgagtccacaaaggtcttaaattcgataaacattgtttttactagtaagtgtcttagtatcttaaaattatagtaagcttgattcttttctatcatgttggcacagttcagttagcaaataataaaatgaaacaatgatgatatgtaggtagacatattaacatgcctttgtatggagcaaacaataagaagcagatgggacagtctgaggaacgcattaacaagagtttctgaagccaactgctgctgcacctgttaacctggaaggagattaatgcagtagaacagctactgtctttccatatttcttaccacaaaaagatgttttattacattcattgtaacctcttggtaacacattcagaatacaagcttcttcctagtttccgcacatgtctttctcatgatagcatactgtctttgaaaattccatctgctttgatgatttgggctattctatcaaggcaatataaaattgtttttcttaaactttattacaggtcattgagtttcatgatctatagtgaatatttctgtattgatttgttggtatttttattttctcttctcaagctccttgtaagtggggactagcaatgtattttttaattttccgaactatttaaaatctttgatgccaatgattcaacttaaattctggttatatacaccaatgataatattttgtatctagccgatatttaatatttatcatttttttaaagaatcattcactttcatcactatcatagagatgggacaaaaaatataaagactattttacgtatgtatgacttgcttggtaattatttgctgaatgaatgaaaaatacaaaaattgatagttttgctcttacccatcttgtatatctcttccagtgctcattttgcattatgtattagttcatctttgcctttattaagagtagaaaacgccatttcatcttttacatataaaaatgagtctggtctgatacagttactcacatcttcgcttaaatttcttttcttcttcttttttttttttttttttggtggagtcttgctctgtcacccaggctggagtgcagtgacgcgatctctgctcactacaacctccatctcctgggttcaagtgattctcctgcctcagcctcccgagtagctgggattacaggcatgcaccaagccacccaactattttttgtatttttagtagagacggggcttcaccatgttggccaggctggtcttgaactcctgacctcaagtgatctgcccgtcttggccttccaaaatgctgtgattacaggtgtgagccaccgcacccagcccagtgaaatttcaatttgaatttggaagctctactaaggtagtaatgtgaactttcaatattattagaaagctcatcaatctgaaatttaacataaggtaaagaaataaaaagcattaagaccttacttcatatgagagctagaatccatgacctgaaaaataaagtagataaattcacttataaaactataatttaaactcttaacttgtaaatttggggaaattagtggtgaatgggtttctaatatatggaacatgaagcagtaggaaatatgttatgagttgtgacagatattccacctcccacgagactgtgatttttagaatcgacgtgttataaaattgatctgaactttgtccctgatgctggaaaagtggcaacctgtgactgctctaaagtaagctaaaggagctgaacaaggctgggcacagtggctcaggcctgtaatcccagcactttgggaagcagaggcgggcggatcatgaggtcaggagttcaagaccagcctgaccaacgcggtgaaatcccatctgtactaaaaatacaaaaattagccgggtgcagtggtacatgcttgtaatcccagctactcggggagctgaggcgggagaatcgcttgaacccaggaggcagaggttgcagtgaaccgcgattgtgccactgcactccagcctgggcgacagagtgagactgagtctcaaaaaaaaaaaacaaacaaaaaaagaagctgaacaaatgctggcattcatacatggtttgagaaatagccctttttcatttaagggaaagacttactgagatccagattgagaaaacaccccatcaacaataaagtggctcaggaaaatgttttatactagcacatcttcaagtttctacttaaggctattctacatgaatatttaaaaagaggagatgtcaaatataaaagcacaagaggccccgagggcttagtatctttatttgcgttaaggtttctcataaataattctatttggggatataggctctggtatatatgtaataaatgtgagtctttttaatatcagagttacccttaggatagtaagtgtatttatttcaaagaaatataaaaataaaatgaataaaatatttcaggtacctcagatcattgcaaattagtcctcaagtctctttcagtttttcttggattatatgaataatgctttgggatagaggaaactcaccaaagtatatttctgaggactgggggtgggaaaggtttcagaaaggagaaacccatgggaagaatttttctactgactgtcaagtaattcatctcaacagaagaaaagctgattttcgatcagtttaaggtaatagaatatgtcagaattcctggggttttctttgttcaatagcccacttaacctgctgcagaacaccctaggaataacaaatgaatcataaggtagagggacattccagcacacttgttttcttcaaatattgatattttccccttaaaattatatgtctagaaaagcttttgctcggacagagtctgtagggccagaaatataaataactgtcaaatataaagctgaatcgcctccacaagattttaggaacttctgggctggggaaatgtggcctgaaggaaggctgctggtttggccactctctgtattccatcagaaaaaatggtggggtataatcagaagttgaaatgctcacagtagttttaccccatggcttgtcagctgaatattgcgacaatataggaattcttcatcgcagaaggaatgagcctccctggactgatgattttctcagtttatggtgtgtgtgacgtttttgtaaagtggcaaatagttgggggcatgagctagaaggtaactttaggaggttcaaccaaccaagtaccacctgcgaattggacaaaattcaatggacaaaagaaaacttaattgtcagcttactcccgccttttactcccgggacctagcttatagcacatggttcataaaagactctataaatgattactgaatgaatgaataagtgaaagtgcacaaatgaatgtatctctgagattttaagacacttttgtgttcatgcgtcttgcctacctgtctccggtccttctgaattcataaaaagaagaaagttcattttttctggaatgactgatcttaggaaataggaataagtaattctgatgggtagaaagtgcagtgtatgaagattcagaagggtaaggccaattaatttaaacactctgagtctatgttctaacctgtaaagaaggctgataatatttgccttctctgctatggtgttcccgaattgtgctttccaagaaatataccatcacacaatatatggccgtggtgaatacagtctccaatgtccttctccccctgcaatgtgccaacagagtgatctccctaagcatacagggtggtgcagtgtaaaggcacactggtttctgtttgaattccagctttgctacttactacctccataatgtgtagcaagatacttcatcactcacctgtaaaatgatgataaaatgatacttatttctatgagaattaaatagctgatacaagtaaagagcttaaaacagtatttggcctgttttaagtgctcaatagatcctagatgttgtcattgctgttactactgctgctgctgctactactactactactacatatttgtttttggaccctacttaatcccataggttgccacaactactgtctacataatgaaatctaacccccaagtataggatactggtttctaaaaatctagttcatggctatagttctagcttcattcaccaccgttctactagcaataccagtccatctgtatttcctccaatagaccactctatttttttttttttttttgcctctgcacctttacactggatgtttattttgcctttagtcacatatccacaaagagatgttctgggctccatatgatggagttgcatacagtgctgagcttttctttcagggacatattcagaaaggatgagtttttgattgttgtcaaatttgctgttatgctgattttttttagaactgtttgggcgactaatacaaattcatccaaagcttgttaagaatacattgtaatcatcagtatttttaaaaagcgattcttcattctttaccattgtgtttcccatcccaaggatttcttcagattaaaatattaaatgggacaggcaacactttgaatgtaaaggagaaatgggaaacactaacacaatggtggcatgataggggatgaaacacagaaagttggaaccaaaggggagcaccatcgttcatatttatgtgtaaggaaaagaacagaatgtccttgggtagtttactatttcttaataattctcctcacttttaggcaagcttgccagtttttttcagtggggatcacaaatgcctatctgtctgtctgtctgtctgtctgtctatctatctatctatctatctatctatctatctatctatctatctatctacctacctacctacctatctaatctatctatcatctaatatattatgtgtgcgtgtgtgtgtgtgtgtgtgtgtgtgtgtgtgtgtgtgtgtatgtaacgatttaattgaagcaatggtaagacattacaacttcaaaaatactgttttacttcacatacactttacctctaggtttcatagcaagacaatagatgggtgtagttttagtattatttacttttatttgttaattcaaggcactatagaaatacttaatctgtttaaaccccaaacatctctttaaaatattttatgtgacgagcaaacagaacatcatgatctaataaaaatgaaaatgtttttgatgttaaatgttgaggtaaaacttttgttcagttattataaaataatgacattttgagaacctcttatttttaattttatcgtctctaaaattgagacaatcacatcttggtatcgataatttttgatgcatgatgtaatatttaaaggactttaaaaatgtaaaatgctgcataaatattattgctctgcttaacagtgtttcaaatacatttttggaaaaatagcaaagtaagagataacatgtatctaaagttctcatcccttatcaactaaatattatgaaaaccttagcttctcttgcttctccagaatgacagattagcttcagcctaccttagactaggcatatggaattggcaaacgctctccttagcaactgcaaagttcaccgcagatgcatttaacagaaatagcacagatacaattaagcaggtagaaagaaagaatgagcatgtaaaacacctacaatattccagatttcctgctcacttaattggatgattcagatacctctctttcataatgtccaggtgaaagaaatgccggttcctcttatttctctacatcaaactaaagctccacttaccagagcaaacacaagtacaatctgttatgttttggactgtctaatccattctctgtagtttcacaagaatctggtgagcttacatggcatccagagaacagggtgatgagtaaagcccttaactctacattgtctaaagaacctgatttattcaaagaggaggcagctctctcacttcttattaacagagggtagagagtttctttcccaaggccaagaggggttttagctattaatacactttctctccctccgtccctggtgtgtgtgtgtgtgtgtgtgtgtgtgtgtgtgtgtctgtttctctcactgtcaattttgagtggggtttcaaggtttaaataaggtgacaagtctagtagaaaaatctctgaaagagctatttgtagaacattaactgactagttgtgtgactttgtacaaccagcttaaggattcagttttataacagataagtttagggaaataaattgcactgcacattgccttcggtctgttgtacctcaaatagcttaggaatctgttttctcctaaaacatcttcctggaagctgggtttccgctccaccccacctcccatgtgtttatgcattcctctgctcctccccttaactgagaatcctcattagaggcctgggtaaaatgtttcattgttagagttataatatatcaataatttacattaccttaattttgtaatttcccagggcattttgaaatgttatgataacatgaaaaatgtatgactttcctcaatgaaaagttaattaacaattgcttttattcttcaatgaacagctttatggctaaattattactagttttgtttttaattagatgactaaataatgcaaaattagaccatctttgtcctgacactgaattagaccattctttggcaactcgtgtacaaactattttcatttttaaaaaaatgtatgattctgagaacaagtaaatgcaattagaattgtctttcagagggaaagtggccccaaatgatgtcaagaagccagttttatgataaagatgtctatttttatgaaataaaagtaaggagaaaaaaagaattaatacaacttcactttgagattttatttttttaattcttgagttaggctgaaggccagatttgtaattgctcgtgtatgtgctttctaaaacttgcttaaggaaaactggatggattttctaaaaggcaattaaagatttgcagttgaaaaatcatcctccctcataagtattggtgtatacagtggtttccctgcatggaggatatgctggacaatatattgagaactgcagctccaggcaaaattaaactagtgttttttagagatactaggattagcttgtttactaatttgttaaagcagctgcgtttacgaaatacataagccttaagttttaatcttagaaacaccctttcccaaatattctaacaagctcaatggtcctctgcctttgctgatatttagaacatcacgagagtctttaaaacttacagatgcctaggtcccacctgggaagtttctaatttaattggtttaggtggcaacctagtcactgggctgtttaaaagctccccaggtgactataatgcacaggaaaggttgcaagccattgaacttgtaaacaatatagcagctcccatacaaaagcccgtaaattcaaagaaaatccagccatatgaacaagaaaaaaaatgtcaacgaagcagggacttcataaacatatgtttgcaacaacacatcattgaatatgattaatttgatatatctgttttgttataaaatgtctagaaaaaaatgtaatgtaacaaaaccagcaagcaatttaaaacaaataggaaaagatgattagtagatcatatgatataatttttagataatacaggaatcggacattgaatttacgttagatttttatagacagatatacagaaaaacactcagagtagacaacaggatgttagcagtggtgctgcttaatgaaaaaatgagttatctgtacttttcttaatagttattgttgtatctttttatggtaaacatacattgtttttgtaacaggagagaaaaagtagtgttctttccttgaaccaaaaaaaaagtaggccatttaaaaattaatgaataaggaaaatacacatgaaaacttctggaataagaacaaagctgtaatcaaagaaaattaatagccttaatttttttatatttgagattaaagggaaaataagagaactaaacatttgattctgtaagaaacctttaaaaagcagtacaagaaataacttcaaaaatactatattgagaaatgctttcaaacaactaagtatgaattatctgtttacaaaattccaaaccatgaaaatagtatttaaacctctatgttcatgttctaaagcccttataatcttgattatgagacttcaaaaaaatagcatacacattgaaaactatcaaccaatctcaggaatacagacgttcaaatcttataaaacatagcagatttagccaataagagaagaagttatcatgccaaattggatttatttcaggaaaacatatatgcctactataagagaatctatttacatccttcattgtaggtaaagatcagaaggaaaaaatatacaatactttttagttatgaaaaagtattgataaatgaaaagaatctgtccctaatttaggagtagaaacaaaacttttagcaatgtaagaatagatgatagtttataagcatgaaaaatattgtctatctcaaaacaagagccaactctgtgatcaatgttgaaatattgaaggtatcctcattaaaattagaaatataactagaatgactaccaaaactgctctttttaaatgctattttgcatattctagtcagtgaaagaagccaagtaaaagaaacaggaagtataagtattggggaaaaaagtcaaattattcatattaatagatgatattgtcaacttggtactaagtaaatcaacaatgacaactattataactaatgggaaaaattagtcccaaagctcattaagaaaagaaaaaacctagaaataattaaatattaattaaatgtaatttttctaaatgctaatttctcttttaacaacctattgaaaatcaaagctatcattttccacagaagttcaaaatgtgaaattactgtgaatttatttagcatgaaatttggtgatatacaagcctttactggaaaaataacagaatatttgcatccatggacagatataattttatatttcttggtgggaatattaatattttagacatataatttactacaaattaagctaaaatctgatagaaacacataaaatttaaattggggtggcaggaagacattggatgtgacaagaattactctaaagtttatctggcagcaatatagatgaggattaatagaaaatgttgaaaaccttaaatgaaaggtcatttgcccatgtagctattagagtgtttaataaaacttctactggctgggtgcggtgtctcacgcctgtaatcccagcactttgcgaggccgaggcgggtggatcacctgaggtcaggagttcgagaccagcctaaccaacatcgtgaaacccagcctctacttaaaaatacaaaaattagccgggcatgatggcaggcgcctgtaatcccagctactcgggaggctgcggcaggagaatcgcttgatccagggaggcagaggttgcagtgagctgagatttcgccactgcactccagcctgggcaacagagcaagactctgtataaaaaaaaaaaaaaaatctactaaaagtctatacaaacagattagtgaaacaaaagagaaaatcccaaaatatgctcaagtgtatataataaaaatggaatttcaaatcagtggatagagatggactatgaaagaaatggttttgataatcatgttaaaaggcaaaaccctgctttacacaatgcagtgaattaaatttcaccttgaacaaatattcaatcataattaagcttaagaagcccaaagaacaggaagaacgataggtgaatatttctacaatgaggcgatggtagagaactatgtagaaatgattttaaaaacccaaaatttaaaatggaaaacacatagataatttttaaaatctgtacattaaaaaccagtaaactgaaattgaatcttacaaatcaattcagaaaaataaatgcattgcctaattttaagcatacaggaagaaagtgttagacctggaggtcattattttaagtgaaatgaaccagacacagaaagtcaaatattgcatgttcacccataattgtgtgctaaaaaatgtgtacacatgtacacagagagtggaatgatagacaatggaaacttagtagggtgagggggttggagtggagtggataatgagaaattaatgtgtatgatatatttgggtgagggacgctctaaaagccctaacttgaccactacacaatctatgcatgtaacaaaattacacatgtaccccatatatttggacaaaaagaaaataaaacacatccaaaggtatatgaaaaaatgttcgatctcatttgtaaccaaataatgaaaataaaaataacttttccttgtatactttgtatgcttctgacagaagactgaatcaatttatttcatgagagcagtttgcaataccaatcaagagaaagcgtgcttacacttgactaagcaattgcatttccagggaaattatcgaagaaatgcttacatctatgtgcaaagactgagttgtacctatatttattgtttaattgttattacagtgaaaaatggaaacaacaccagtattcatcagtaggaggctactaaaaaatgatatatctctaaagaagggaaatttaaaataaaattttacaggtgattgcattgatattaaaggtaatccaaatacatacatgaaaaaataaagcagactgtaatacacagtatgtatacatataatgctgtattatgatcccgcttatatatgcatatatattaaaatataaatttttaacctctgggaaatgcattcctacctaattttaagtctctcattttttcttattggaattttaaaaagtgtacaatgcttattaatgaatataaatttgtttgaatcaatgttttcaatttttaatcaaattatctgtacatgattcaagtaatttttacttcataagttcttttatttaaatatgctgcattcctctctcatttctcactcctcagaggcagatatttgagtcattctctttttctaatgcgtgacaaatctgtaataacatgtttatatctctaattcttgattttctcattttttcatggtctacagtctctcttatgagagatgaaaaattatctcatttatatctaccccatgtatttgttctattaactaatttttcttttacatgaagaccttaaatgttaatttttttcttcaaaacagtgtcaaaagtatgtcttaacccttcacatgataaaatggggattttagtggtcctccatgtttcttcacttctcctactgaatttcttctcccaaattctgtaaagtctacttttaattttatgttgagttgcattccttctgtgttctctaactatgattaggtctcgtgttttgtcaaagatttattctaaaaattgaaaacatataaacagtatgtacactattattatagcaccataaatatatttcattgcagagtctattaccgtgttgggcttatatttcctttcctatgatttccatggcaatttacctctgctactttacagaaaatttcaagattcaagttaaaatggattctctttttttttctttttttgttttttgagacagagtctcactctgtcacccaggctggagtgcagtggtgccatctcggctcactgcagcctctgcctcctggattgaagcgattcttctgcctcagcctcccaactagctgggattataggcacacaccgccacacctggctaatttttgtatttttagtagagatggggtttcaccatgttggccaggctggtctcaaactcctgacctcaggtgatccacccgcctcggcctcccaaattgctgggattacaggcatgagccactgctccagccaaaatggattatcttttcttacactcagtaatctctcaaattcaaataacgacataggaaattcctaagtctattgagtctttatctaccaaatctccctctctttcactttctctgtctctcttatgtacacgtagacacgcacacactcccttctcaaaaggtaagagaataggatggtttgtaaaggggaaacgtctctggaaacacccacactttaataatgtcttaactaatcacattgcttgggtgtttttgttattttgtagtttgcggttttgtttgttttattttctgataacctgcagagtaggaaagaagagagtccagaaacttgttgtaaagctggacttcaagttggaagaaatattggaaggaccttttaaaaagagagttgtatgatatcgaagcagcctatttccctgaccccttcccgggactcgtgacagggttgcctcatttacctagaccagttttcaactccttatgggagggagcatgcaagtgaattccaggggtttggggtacgaatgatcctgtcacccaggtactgagtatagtacccaatagtcagtttttcaacccttatccccctccctccttccccttctagtaatccctagtgtctatcgttttcacctttatgtccatgagtacccaatatatagctcccacttacaagtgagaacatgtggtatttggcgttccgttgctgcatgaattcgcctaggataatggcctccatcacagctgcatctgtgttgctacgaaggacatgatttcattctgttttatggctgcatagtattccatggggtatatttagattttctttatccagtccaccaatgatgtgtatctaggttaattccatgtctttgctattgtgaatagtgctgtgatgaacacgtgaatgcatgtgtctttatgttaaaacaattttatttattttggatatatattcagtaatgggattgctggattgaatggtagttctgtcttaaattctttgggaaatctccaaactgccttccacagtggctgaactaatttacattcccaccaacagtgtataagcattcccttttctctgcggcttcaccagcatttgttgttttttgagtttttaataatggcctttctgactggtgtgcgatggtatctcattgtggttttgatttgcatttctctgacaattaatgttattcagcattttttcatatgcttgtaggctacttgtatgtcttcttttgagaggtgtctgttcatgccctttgcctgttttttgatggcgttgtattttgcttgttcagttttttaagttccttgtaaattctagatattgaacctttgtgtgatatgtagtttgtaatgattttctcccgttccgtaggttgtctgttactctgttgatagtttcttttgctgtgcagaagctttttagtttaattaggtctcgcttgtcaattttttggttttgctccaattgcttttgaggatttagtcataaatgctttcctaaccccaatgtccagaatgatgtttcttaggttttcttctacaattcttctagtttgaggtcttacatttaaatctttaatcatcttgggttaatttttatacatgtcgaaaattagggatccagtttcattcttccacatatggctagccagtccatttattgaacagggagtcctttcccattgcttatttttgtcaactttgttgaaaatcatatggctgcaggtgtgtggctttatttctgggttctctactttgttccattggtttatgtgtctgtttttgtgccagtaccatgctgtttttgtttttgtttttgctcttatttaaatgttataaaaattgcctatatttaagatgtataatgggatgttttgatgtgcatatacgcagtgaactgattactacagttaagctaattaacatatccatctcttcacatagttattttgtgtctgtggtaagaaaacttacaatttactctcagcaaatttcaagtatacaatacagtattactgactatagtccctatgctgtgcattagatctccagaacttattcattgtatgtaactgaaacgttataccatgctgattcggttgctgtagccttatagtatagtttgaagttgggtaatgtgctgcctctggctttgttctttttccttaggattacttttgggctcctttttggttctatatgaattttagtatagcttttttccagttctgtgaaaaatgatgttagtggtttgataggaataacatttaattcgtagattgctttgggtagtatggccattttaatgatattgattcttctaatccatgagtatggaaagtttttctatttgtttgtgtcatctgtgatttattttagtagtgttctgtaagtcttctcatagagatcattcacctcttttattttttatggctattataaatgggattgcatacttgatttggtgcttagcttgaaaattactggtatgtagaaatgttactgatttttgtatattgattttgtttcctgaaactttactgaagtcagtgctatttttagatggatatatgagaatatttaacttatatggagagtcatagaaattacacaatttgtatttcatacatcatccacacacatgctttctttacttaccagaatagtggaaatgctgcataaaatgaacttaatggtttttatttcctttcttcataaatgtacagtttatcaagaagatgccctttggcttactgacgtgtaaggagggactaaaaggaaaggaaaaagaataggtagctctaacttttcctttctgtctacatcatcattttttattgcaaggtggttggccaatataaggaaggaacaccactaagaaaagatattatgtggttttttggtcattagtgtttcttagaatgtcactcacttcttcctgcatatatatatctcaaatatatatatacacgtatatacacatatatatacatatatatctcaaatatatatacatatatatctcaaatatatatatatacacatatatatttagaagattatttggtgaatacactattagaacaaaaagaaagaagtattagcgaagtgacagggtatttcccaactcagatatatgatacctgctaatggactgttcgtgattataaatgtagtatatgctcattgtagacattatgaaaaacgtaaaatcccctataattagacctctatttgtgctaggcacatgatgacttttcttgctctgcaacaactattttttttctcttaaagtttataatgttgtcagtattgtcggatatcctcagggattccatcatcttttcttaattgtggttaattacttaaccaattattacaaattattttcctataatttattgctcttagtatcaaacaattaaacaccctaggaaatgtcttattacttgatctatgaactggtgagaatctatattctacataggggcttgttttctggttttaaatctaatacagtcgtttggcaaataaagacaaaaaataaatgttgtctacctacttttcaattatccaagtagtttaaaataaaaacatccttactgattttttaaactcttatataattgcctaattctacagtaactggggttggtagtaactaaaacctgttgtattcctagtgatgcccaatgagccttgggaaatgaataggtgggtatagtccagttgctagaaaatacttgcttgttactgacttatctgagaggaaataaacactttcatttatcagggacagagtataaagtgttcctcactgaagcatttctaaaagctctacagtcctttgaatactgataaggactctgaaatgcaagggaaaatatgcaagtaatctggactatcacaggttattttatgaactgctcatatttttactcctttgataagtattatttcccccaaccccaaacccgataaattcgataacccttttcatatataatattatcagcaaggcatcttagagtttcctttaaaaaatgtaaattaccaagagaaccagaatgattttggggctcataatggtagatcttaaagagagtggaaagatcagtagttttcgcattttgctacacattggtggagtgtttacaaacagtgatatctgcgttctatttccacagagtctgacttaagtggtctgtaatccgagcatctcagtttgaaaagtttcctagataattttaatgtgtatccaacgttgaaagccagagtaaaatgaaggaagttctggggcctcagataagcaacttcactacttttttcaggttctttgaataattgacatcatccccaaattcaaatcgttgatagtcatgatgagtacctgttttactccagaaatctatataatattggttacctcagtgcttgctcttaacttccataatcaaaggaggaagagagactcatcgtgttcagatacaggttgtgtaacgtgtgtctgtaaaatactaatgtgattgacttcatccatccattcacctatccatccatgcatccatccatgtatacctcgtgtacctccattcgtctactcatccaatgtctctgtctaggctccaggactgctgccttaaggttgtttaccaactcagtaggtagtatgttatcctcaggctttggaaacaggggggtttagttaaagagcaaaccaactcaacatactagattaacttgaaagggaaaagttatgcttagtgcataaattctttccctcttgtcctttcaaatccatttttcattctttaccactgtgctttgtgtcctggggactgccctttaggaatggcatcagagttcctttgccctacagtttccagttgagacaggctgcagcaggaggagtacagtggataagaaaagggtggagtatttattttcatgtggccccatgggatttccacaggttagctctgaacagctaacattagaccagagcttctgctggacagttctctcttgcatttctattgggtctggctctctagttcaggaaacgtccttcctcttaacccttgaggtctacagttaactctccgtcatcccttcttgaatttcctaacactgagcatatctctgttgataacccctttagcaaactggcctcacataccccgagattgagaaatcaatcctccagtttctaccgggactctgattgagttaatgtgggataatttgcttacactaccctcttataaagtgactatgtacattagcatattaactcctttgaggattttcatttacttttgttattaaagcattacacgttttttgataatgtgtaggagactcaatcatagccagaagtgtctcagacgcaagcacctgtaatgattcccttatatacagttttatcccaccagaaattgggactaggcacaagtgttctaggtaacatttcaggatcctactgtcataaagattattatggcacaaaaactatttggctagaagtatccccagactcctctgtgccacattatcttcctttatccagttatctgaggatgtgcttgcagtggcagactagcttttggggaaattttatttcaagaaaaaaagcagggaggaagaaaagggtaagaaatgaggaagggaagaggcccatgggctaggagtgggctgtcctgtttctgggaaactttgtgaaggtttcaggagtagtagtaactcatggtgaatgaaaatgagagggaattgttggcttttaaagtaataggatatgcccctttatgatgggattaagagatacaagtaagctgggcgcggtggctcacgcctgtaaatcccaacactttgggaggccgaggcaggcagatcacctgaggtcaggagttcgagaccagcctgaccaaagtggaaaaagcccatctctactaaaaatacaaaattagccaggcgtggtggtgcatgcctgtaaccccagctactccggagtctgaggcaggagaatctcttgaacccaggaggcggaggttgtggtgagctgagatggcgccattgcactccagcctgggcaacaagagcaaaactccgtctccagaaaaaaaaaaaagagatacaagtaaagttatgaaatcacctgtggtttctagacagttttttttgtgtgtgtgaaatattaagaacagaatacatgtgctaaaacattttaaaagcttaataaggtcttttaaatcttgcctcttccttttgctcgtctaatattacctcctatgtccacccccacggattatttacatttaatgctttctagtgaaatcattaaaatgagatttatggattattcataataggcaggatgaaaaaggaaggtgaggcgacagtgatccttccttagctgttaatggataaggagtttcacagcaagaggaaaaaggcataacattagtattaccggttgtctaagggggagagatagaattgtttttttttccttgcattttctgtactctactcttatttccaaatattctttaatgtttgtgtgactttgtgacttctatattcagcgcaaaaaggattaaagaattaatttaggaaatcaatttacactgagtgtctccagtgccagagagggagggaaggacattcgtagctacagtgttcataatagcaaataattgtattatggtcataccatggaatattatatagcagtataaataattaactatgatcacatgtaagaatatgagaaaatcataaaaacataatgtagaggtccacaaacattttcttaaagggccagatagtacatatttcaggcttctaggtcatattgcaaatacctaactatgttgttgtggcatcaaagcagccatagttattatatgagtgaataggtgtgagtgagtctaataaaacttcatttttaaaaactgtcagggaggccgggcgcggtggctcacgcctgtaatcccagcactttgggaggccgagatgggcggatcatgaggtcagcagatcgagaccatcctggctaacacggtgaaaccccgtctctactaaaaatacaagaaattagcggggcgtggtggcgggcgcctgtagtcccagctactcgggaggctgaggcaggagaatggcgtgaacccgggaggcggagcttgcagtgagccgagatcgcgccactgcgctccagcctggggaagtgcactcactccagagccggggagcccatgggcggtagtgtgctgacccttgtattagacaacactccagaaagctcaagcataggaacacctaatgaaaatattgttttggcatacatgcatgtgtgataaatcgaaaaaaccaacacaaaacaaatgagcaaacaaaagaaatcaaaggcaatgatatgacaatccccagattctggatggtagttaatcctgggtaaatggagggaggggtacaaaagagtgaagaactagtgtaggagcacataggttcaggtgtgagttgttgctaatatttcagttattgggatggacatatgtttgttttattattgagctttgtaatttacatatccattacatatattcttttatgcatcaaatatcacattacacaaagggaaatcataaaaattggggaaaaattggaggcaagcatagatcttggggcccagtgtagcatgcttttttctatttttaaatttaaaattgtttttagagatgcggtatttctctgtcacccaggcttgaacccctaggttcaagcaatcctcctgaatagctgggattacaggtgggtgccacttcacctggctaactaaaacaaaattcttttaaagatatggtctctctttgttgcccaggctgatctctaactcctggcctcaggtaaccctcccacctcagcctcccagggggattataggcacaagtcagtgtgcctcacttccttcaacattcttaaatacatcttggaagcacagtgtttattaccttgtttctaaaagagatgcatctattgtaatcatatttataatgttcttatatatggttttcattagttttactgaaactctcaacctattgttttttgatgatgactaccaatattcattgattcactgataatctttgtaatgtccttaactcttagggattagatgacattaaatctttatcaagaagtggattttgttacttaagtattttagtagcaacaaaattggtcacaacgacattccactgaagcagaatagtcagaaagcaatccaagccgcagaaataaattaggttgagcaagactacacctaatggcattgagataaagaccctactcctgactcactgccccgtgttctagtggtgtgcctgctctgcaattctccttaagttgatgtgcatctatctctttaggaccagggggtatttagtctgtaatggcttttccggcaacgtgtctcatttcagctgcttcagttgtcgagataacactctcgtcactgcctctctgatggtttcccattcaacagcagtcatttcatcttgggacacttttcctcacagtcaacagtttttcctttgtgtaattaagtctcatttttttctggatagatccatttgtgccagaactcttctgctgccttgaagcctgcaccattcagttatttttagtgttatctctttcctttcattagcacagagctaaattgtgcatattttgttctttcagctttatacagattaagatcttctagctccttagtcattcattttagctgttgcattgaatttcctacagttcatttaaatcacccagttcagtttaatatgcccagaataaataaagcatcattttttttcacatctaatcacctaccccgaccaatggcaagtgtaaggattataaacctttgtgactttgcctgtttactcccttagtaggtgagctctgagccaaaatataaattcattaaagtttttcttaatatctctagtctctacttctggctcccttccctcagggtattatcccctttacaaatatttttttgtgtctttaggtttccatttgttttttaaaaatacattcttatcaaaacgggaaaatattttcccatttctttcataaaccatgttttctcaatagttatctctaatcaaatacaagaaacagggaaataggtagtgccttacaaaggaattttagccatatacgtttggataaggtgaattttccatatcctggagatggttttgagtactcaggaggctacatctgaaaaaaaatatatagttattctctatctgggagtcaacttaattcttttgatggaaaaatagaggctgtgaatccccagctccagctggcagagatcactttgctcagaagttttgcacgtaaaaagaaacttcttttctgggatcactgatttatttcagctgtaccctgaaactggtagtcagatacaccctgtaaccagcagatctgatattctccagccttttcgggcttgtacatcaatcgtttaaactacactataatggggatcatttgccaaagctcattgccattctcttctagtcataccaatttataattacttttctctcaatatgtacccacgactctcctttcttcacccttatgatatttattcaaatattaaatgttgccctttttttctacctttattccaaatgccttagaggtctggcgtaaactatatggctataacctattgcatttttaccccatagatggaaaatgtattggtgaattgtttataaggttggaagttcccctgaaaataaaatccacccaccccactaggggagtacggaaactatatataatatgacacacatcgctattacttttattacatatgcttattatttattgttcaaattttcaaatatggtcctgcacacaggcaattttcacaaaagagcagtatcagtgttaatcagtttgaaacaggaaaggatttgtgaccccaccttacaaaatacaattccttatggttacaaaatctcattcaaatggattctattgtagccatatcaataaggaaactgatctatcagccaaaatcggaaatagccctgataaagtagactgagcttacattcatgcacagatgtttgctcattatttttacttgataaggacagatacgtttgtgtttagcataatgcgtgtgtgtatatttgaatagattttctagaccctcattttagttctagtaacaattgtctggttctgaatagggactttccactttacagaagcaggcaaaatttaatttgtcatagctaccactgaacccatttcctttatatactcaatctgctttgacacagtagatattggagtttcaaaccttaaaatgaaatacagctttatgatgaaatataagttgatatgaatactttcaatatacctatattctatgttacactcagttagctggcatttggtcttcactcatggacattttaaaaactcatacattctttagtgtttgataatgtgacaaatcaaccccctataaaattaactttaaatcaattgatacgttagcatgtgagtatatgtgtgtgactatgaatacatacttatataagcacacttatatgcttatacgtttgtttgaatctctcactgaccttagccataaaaacacttttattctgttgatttatacctcagcctacatgtgaacaaaagattcagcaaatcagaataacacagttactctattttctaatttatttgtaataaatatgcattacctgcataacgtttacatcaatatgggcatacattacttatgcaatgtaatgatctaaataacgcaactatcgacagtaaccacgcactctccccctagcaattacagaatacagtttctctgttgcacaacatgcctgactatcgtaaatttagggttatctccttattaggattccatttacactcttaatgaatcatatttattttatagcagcttattagtaaagttgactgccaagatataggcaatacatacaatttcctcaaaaactggggctttcactgttaatttaacaaacctatatgaatccatataatatatgaatcatatgaatatatataatatgtaataagataaaatgcataatttaacatatatgaaatatatatagtattaattgttaatatgtattaatatagtataaaataatatatataataaatgtataatatataatatatgaatcatataatagaaaaatatatgcatagacttgagttaggtgtaaagaatggaaaaattaaaaaatagtgcacttgatgagttcacaacctagtatagtgtgtcatagagaatgtagcattttgtgtatgcaatagtaaatatatataatgcaaaagaaatgaatggttttgcttagggtaggaggaatggggtaatatttgagataaatctcaaagcatgtaaagatttatcaaatgaagaattggggttatggaggagtaggggttgcattccaggagggagggaccaacatgtacaaaagcttaaaggaatgtaatttcatagtatctgggaaggacaatgggtagctatatgtttctgaaatcttgaatgcttgggtgaaataccaaaaatagggctagaaaagcaggttatgattagattgtgaaggcatttaaaagcgtcttgattagttgggaaataatttctacaacgttttagttgtataaataacaaaagcttcttttaatccagatacttagtggaagttcctctttctctaagtagaatactagacctaataataataataataataccgtatcatatatttttattacttttttggttttctgactactttcaagtacagagatggtccccgacatacagtagttcaacttaacaatttttcgactttaggatggtgcgaaagtgatactcatgctgtggaaaccatactttgaggacctatacaactattctggttttgactttcagtatagtatttaataaattacatgaaatattcaacattttattataaaataggctttgtgttttatgatttttttcccaactgtaggctaacgtaagtgttctaagcatgtttaagataggctaggctaacctatgatgtacagtctgttaggtgtatcaaatgcattttcaagtttcaaaatttccaaactatgatgggtatatcagcatgtaacttcattgtaagttgaaatgcccatcaaagatagactggataaagaaaatgtggcacatatacaccatggaatactgtgcagccataaaaaattatgagtttatgtcctttgcagggacatggatgaagctggaaaccatcattctcagcaaactaaaacaggaacagaaaaccaaataccacatgttctgtcttataagtgggagttgaacaacaagaacacatggacacagggaagggaacatcacacacctgggcctgtcagggggtggggggcaaagggagggatagcattaggagaaatacctaatgtagatgacgggttgatgggtgcagcagtccaccatagcacgtgcatacctatgtaacaaacctgcacgttctgcacatgtatcccagaacttaaaatataataataatataaaagaaaagtatctgtgcttgatgggttttgatatcctcagtaactatggccaattagttgaacatggcacagtattatccatttgcagtagaggaaacaaaggagaaaccagaggaacagtgagagagagagagagagagaaagctgctggtcatgtcctctttccagcatgtcaccctccatattcttcttcaaatcaaaaaacgtagaacggaagggagcttagtagcattcagctctgctacactgcacaccagctatacacacaggcaatcaatatggtttggacacagctgatataatttggtggagctctaattgaatttttccccttcttaatataattacacctacagaacgtctccaattaagtgtccccccatcagtctcaaaattaaatataccaaatggaactcattatctactcccacataaaccagctcttcatgactctttcccctttctattaagcaccactgcttccaggctcctatatctgaaatccctgaagtcgcttatttttgtattcctttctccatcccgaaatccattcagtcactgaatgctattgactaatgtttgaaattatatctatgcataccttcctttacgttatgggtaaatgtttttggaatgtgtttaaacagaacaaggaattggtgaacaaaagaataaagccatgcataaacaaatgtttattcaccgttttcattatatttgtttgtagtactgcaacctaaagtttgtaatgtctgagaatatctgattgtaagcaattaccccaaccccatgtaagttaacagtgttataactggtacgtctccttataggtgaatttgttcaaagttgcttaattatattttaaaaatctcttattttagaaagaactctcaattgctttactctgaataagataatactgtttagaagacaaatcattgcaagttttacatctgtaagtaggttacctgatgaaacggattgaaaaactgaaggcaaatattgaatgttagattattcccaggtatctgacttcatcttcttacttgctaggtgtcattgttaatgataatttaaaaaatcacacatacctacgtatccacatatacaaaacagtaagcagtcatgctattgaattcacaaatatacaccaaaagacaaggggaaaaatataaacaacagctttcttactagcaagcagagtgtggcgtgaggtcaaatttttatgacgaagagcatacatattcacaaagtaatttatctcaacttatgtagctggaaatggagttgatgggttctgaaaaaagcttctagatgacattaaaaaaaggggttcttatgacaaagaaaaaaattacctcaaagtagctttcaaagagatcgaataaagtcatttcatgaaatgcgagactaaaaaacatgccagcatttctaatatttctaatgttttatatgatataaatatgaaatataaaaatatttaatatttttatcatagaaaattaatggcatcaatttcttatcaaaatcatgcatacaattgattatatatatttgctaaagtcctaaaattttgtgtatacatgttggcctaaaatatttttgagggctcacaggcatattttcttttgggaaaatggaaactgcctaatacatgagatgatttatatacatgctgcattttacaagcggttagggaaacacatgtctattttttttctaaatcaaataatccgtgtgtgcaccatgctaccttgaatatcagattatcagatttaccatccctattagggatataaatgttccagaagaacataagagcaaatttttagaaagattaatacagaatctaaagattgaagggataagatgatttacattaaatctgtttccaggatatcctagttgggaaatcaacctaaatacccgaaaacttaaataatccaagacagtatgcatttgcttaacagactttttctccatcatttgtctgtgtttagtaagataaaagaaagacttgcggccgggcgtccgaggcagcgggtcacctgaggccgggagttcaagaccagcctgaccaacatggagaaacatcatctccactaaaaggcggaggttgtggtgagctgagatctggccatcatactccagcctgggcaacaagagtgaaattccatcaaaaaaaaaaaaaaaaaaaaaaaagaaagaaagaaggaaacttgctacccctcagtaaacaagttatatttccttcataactttcttcctataaggcaataaacaaatatttattaagaacctatcatgtgccaagtaaataagtactctgtcaaaacaagttagattcagagtgggctggaatgatttggacagaagggaatgtgagaaaggctagataagatggaaacttttctgccacaggcataccttcccagtagacgaagtagagatacaaataatgtagcgaagggtactatggaataaaaaagtcaataaatttatttatttagtgattacagctacgatttgctaagcaattaatatatgtcagacattaagccaagacctctgcagatgatgccatgtttagatcttataacaacctagtaaatgtgttaggatgatcaaatccattttattttatttaaattaaatagttaattttaatggatagaaaaaattgtttatctttatttcattcaacatgttgttttgaatatatatatatgaatggctcagtcaagctaattaacatatttattacctcacatgcttatttttttgtaggaagaacactttttttttttttttttggagatggagtcttgctccgtctcccaggcaggagtgcagtggcttgatctcggttcactgcaacttctgcctcacaggttcaagcgattctcctgcctcagcctcctgagtagctgggactacagcctcacgccgccacatcctgctaattttttgtgtgttttagtagagacggggtttcactatgttgcccaggctggtcaggaactcctgagctcaggcaatccgcccgcttccgcctcccaaagtactgggattacaggcgtgagccactgcacccagccaagtgaaaaacacttaaaatctactctcttagcaattttcaagagtataatacattgttatgaaccacctgtagaatcaacatgtacaatagatctctcgaacttatttctcctgtctaaatgaaattttgtattctttgatcaatatctctgcaagcctcacaccctcctcccagtctctggtaaccactattctactctctacttctatgagcccaactttttagataccacctataataagcgagatcatatgttatttggctttctgtgcctggcttattgcacttagcaaaacttcctccaggattatccatgttgtcacaaatggtagattttcttctttcatgtctgaattatattccattgtgtgtgtgtgtgaccacattttcattatccattcatttgttgatggacatttaggttgaatccataccttggctattgtgaacaatgctgcaatgaacacgggagtgcacatatcttttcaatataatgatttcatttctttgggatacatactcagtaatgggattgctggatccatactcaatttaaagatatagaaaacaagccataaatatttatgtcccccaatatccaaaagttaatcaatggccaaatcagcttaatttgtctgttttgtttttactatcaaacttaatacattcaccaatgctctttttcatagttgtagccttttcttgaagattataacgtttagtagtttagattgttatgtagacatgtggtgattaaagtaactcctgcaattaatttaactaattttagttatcatgtactacacttttacatactatttccctcaaaaatgttaaaaagcctttcttaaagcctttttagcagtgccttttatatttattcgtgttactgtttcatcaattgctttagtttggtgacagtttcatgtagttcatttactggattcaagttacagtccagttacttgaggggcccaaaagttaaggacttctgaaagtgcgtgaattgcttctactcactgatgcatcccaaacattcagatcttgttacctgaatcaggggttctattctttaaagttccttggaggatactatcagaatgaaaagactcaaaatagaagtcttccggaatacaatgttgtggttttaaacttaaaagtattgccagtacaacgttagtatctactgaggtggtcacactcattccagcaggtcacatactgagaactgcataggctttgtatggtaggccaaaataactttcagattgagtccatcaattatttttctaaaaaaaaaaaaaaaaaaaaaaaaaaaaacccagagtttttgaaaaacctacttagtcatttggaaaaatactatgacattgaaaatcatattcctggaatccctaaacattattaccaaaaccatcggccacagagctgtcttctactttttccccaaccccactaattccgagtgtatctgttcttaatattcaggttatacttaatattccatcttaatattttattttaaacacgttttatgctaaaaatttacacatatatttataatgttctttctttggggatatgaggattctactgctgacctactgctgaagtactaaaaaatagtacttcagtgtgtacagtaatagggttgagcaatttattcatgtcccagccaatttccaagtatccacacacatttcattggcaaagtattcatatccactcatcagagtttgtaatgtaaactgtttctaaagaatattttctcactctttcagaggagaaaatcagtgtattttaaaacataaagctaataaattccatcacacagaaattaacttcaatagggctgtggtttgaaatatgttgtaatccactgaaggaactcaggtaaaactagtaggttagctaatatttattttttatttttatctttaagggacaagatctctctctggcacccaggctgaagtgcagtggcatgatcatagctcactctaaccttgaattcctgggctcagatgattctcccacctgcacctcctgagtagctgggacaagtgcacaccacgccctgctaattttctttttatttttcgtggagacagggtcttgctatgtttcccaagctggtctagaactcctggcctcaagcaatcctcccgcctcagcctcccaaagtgctgggattacaagtgtgatccatcatgcctggtctagctaacatttttcttttttcttatttcataaaattgagactcactttgcatccatagacttatggaaacattttgaatccagatgccgtagccatttttttgtttgttttggtttgtttttcaatatcaatagaatcttttgtaagcaaaagaaagcaaggacttctttaataatttctgatttttatcgtggcatttcctcactctcctcatgccagcatagtccaaagttgctatttgctcaacattattcaggtacttaaatgtttaaacttgatagtttttaatgcatctataaatttaaacataattctggaaagcttcattttctataattaaaagtgataatctatcttattttaaatgtatttctgtcttgggtatcttttcctaattaaaatttaaactcttattttacaatgagacgttacctcatttatttttcattaaacaaataaaaccagacaatccctgaaaaacctatgaagaattatctttttaaaaatataacaaatccatgtgatgaaaactatctttttacatcaccactacacagaaagtttttcatttttttatgtaatcactattaataaaatcatccatgtaggacaataggcaattatcgttaacacctatagcaaagcatagataaagttgattttttgtttttgtttttgttttttttttaagatctcacttctgttgcccaggctggagtgaagtggtgcgatcttggctcactgcaacctctggctcccggggttaagcgattctcccacctcagcctaccgagtagctgggattacaggggtgtgccaccacacccatctaatttttgtatttttagtagagatggggtttcgctataatggccaggctggtctcgaactcctggcctcaagtgatccccctgccttggcctcccaaagtattgagattacaggtgtgagccactgcgccccaccctgacaaagatgattttactttatcttaacctcatcctcataatggggtttgataattacatttcatattttgatcacttaaaattatttttgttagtagcattagtattttgtacatgaggaaaaggtgctatgtaaccatcaaagtacagttctctttctaacggtaaaagtggttgtgcaaaatgtagcagttaatgtctataaataggagacatagaattctatgtttctctcaagaagaatttctgttaaaatataggaaaaatatatcaattcatatttggtatttatgtagattatgttatagtactcctattttacttttgtaatttaataagggaaaactttttaaaatattcattcagtgagtaactttattgagactctacaatacagtgtaagatttatataccaatactacaaccattttactgacagaaaaataaaaatctagaacagtttcagaaatgctgcctttttatgctgttctccccaaagcaggggtccccaaagcaggggtccccaaaccctgggccccagaccaatcggtccgtgacctgttagaaaccagggggaacagcaggaagtgagccccgggcaagcctgagctctgcctcctgtcagataagcagcagcattacattctcataggagcgagaaccctattgtgacctgcgcatgcgagggatctaggttgtgtgctccttatgagaatttaatgataaatgttgtaatgtgcttgaatcattcccaaaccatctccccagcccaagtctgtgaaaaaattgtcttccacgaaaccagtccctggtgctaaaaaggttggggaccacttccctaaagcttagggggtaggtctaaatattttctcaagactcctctaagtaaacacataaaagcataattttaatgaaagcacttgtatattactgcaaatgtgatacctgaacttttgtttgcttgctttcttgtttgttagcttttgagaatacaattgtttttattacttagagagtatacattgaaggaaattataagaattttcatacttgaaagggacaaaagaatatgcaataggaaacagtaaaaaaaaaaaaaaatcatgtcagggctttcaaacctatctgcagaattcctttcaagtttcagtcctttgggggagccttttagctctctgcaccctctccttctgcttatgtgtaagccttggtgatgcatttaccaaacccttcatatctgtaatcatgaggtagcttttctccttcattgtaaatttagggatagtagaaactgccttatttaacattgtatctcttatataaccttacatgtaccatacatacatagagtctatgggataaataaacgtttatacaaattaaacatgagatggatgaagagataaacggatggatggatgaatggatggatgggtgcatggataaataaataaatggttggatgaatatgcttataattatttctatgtaaaatatttttagtgttaatgacccccaaagtgctcttaaagctccaattacctagttaattgcacatagtacaaaattcatagaggtaaacaaaaaagaacgcataaagaaaattgtttctcctattatgttagctagcctcctagttatcctccttctctcttactgggggtgctggcattgcggttttctgtgtattctttcagatatctgctgtacatacatgcgcatagtcatacacatggccacgtatatcagttcaaatctgtcaggaaggtatgagaacatcaatttcctcataccataaaaaacgcagtatactaccaaacttttgatctttgccaatatgattggtgaaaaactatgaaactatgtcttttagtttgcacttatctactcaggaatgaggatgaacatattttcaaatatttaagagcaatttttgttactttttctctgaattctgttcgttttctttgcaagttataatattccttccaaaattgttttataaccagttgacagatgggaaccagtctctaggtggtatcagaaacagtgttatccagcatattcaaacctaccaacttattcgatttatcactatagctaattgtttgagtagttcatacatttatttacactatcaagaaaaacagtttcaacattcttgaccatatttaaaaatgccttttaggctacaaaggtagattgaagagagaagttccaaacagtaatgaaggcctctattccatcccagggaatttgcaaaggctctttcctggacaaacttgtgctattattttgcatgatggaataattttcatccttcaaatctgtttaattgcacatccaaaaaaacaccttctttgactatgaaatccagactagttctctctccttccctggactctctattttaggtactttctatctgaacatcttgtttatttcttcaataacacttattatattgggtgattatgttattttgtcatttatttgctattccctacaatagattggaagttccatgagagtagtttccttgcatgtcttgtttactgttttatcttcactgcttgatccatagtgtggcatgaagtaaacattcaacaaatatgtgcggaaggaataaatgaacatacacatctaatttctggtgtgtttatcaaaaattcaattgtatacttctggtagactgaatttaattcaattgagtttttcccatgtgtgataagaaggatagggaaagggacagatggaggatgagagggtaggagagaagaagagagaaagagatgggagggaggagaatgtagactctccaaggagcctaggctttttactgcatttatttattcacaatttactgcaaatgaatttcacagacacagaaactgcaagcttagacaccatcattgctctgagacaaatgcatccagagtgtatttgaagttcagatataattgatagataaatgtaaagctgggagaaatttattaaaaatgattggtaactcataactttcaaggaagtgaattgtttaaaaaatgtacataatacttgggttagatactgtgtttcttagttaaaatataataatatatgtatttcaatagatcatatatgccaggagacacctgggcgtattgactattacataatagtgattatctttatccatctagtgtttgattgaggacggaggttgatgtatcaaattaaattaattgagatctaagaatgacatcaataaacaaaatgttaagtttcaatcttcctttttgcatatgtactgctttaatctttcggctattgatcaccagttatgtttgcaaagatcacatttaggctttcctttacagagagatttaacttaccctttaaaccatgagtcagtgcttttagttttggggatttagtttccttaaagccctctgagggaaagaagggtatatatagttatatatctccagagaaattgaatatcaaagtctatataacatgtaatttatcaatgattattaactcctgcacttgcctgtgactgcctgtatttggtgatgaagaaaatatagaaaagtagatgattagaatagggaacctaggaaataggaattggaatgtagataatctacagaacaaatggtatcttcttttatttcaattgtcatttgaaaaactttctttgaagagtaaataaaatataacaaatcgggactgaattcagtagaatagactgaatactactaaaacataaaaaataaaagagctaaaaggtaactttaaggtgtagctttatgttcttacatttatggcatgagtgcaaggaaaggctcaacagttacatgcatccatttactttatagttgaatagtaaaaaataatgcagtgaaaagtaatacttcctagggatgttcttagacatgcaacctgatcaaaaaagtataaaacaggttggatagtatctctggaatctcccattaataccaacaatgccttttcatcaaccaacactatttgccatagtcttctcaattctatctggacttcctgattttgatcttttcaagccaatccttttacacactgctctcagacttagtcatctaaagggtctttgatgatctccattgtcttaagttagaagtcctaagcctggcctacaaggttctctattttttgtcattttcctattttgacttatttcctccactctttgactgtcctacttaaactttaaggcagtctccttagacctggaatgctgtttcccactttctcaacctaccaagcttttgaacgtcctttgggacccagacaaaatctgatctttgccgtgatacatttcattaattctctgaggtggaattagtctccctttcctttgattcttctgtagcacctgtaagaacctgtacaatagcaggtatcatattgcatggtaattattttccaaatgtccttctcctcattccaattatgtgtacttcaagggccaggacattgaatcattgtgtgtatcctatgctggaaatatattaagcttccatagagttctcatgtaaattattgtgaaacatttttaatgctatgaagaaagcattttaaatctgtttaagaatacatgttgaccgggtgcagtggctcatgcctgtaatgccagcactttgggaggccaaggcaggcagatcgcttgagcccaggagttcgagaccagcctggacaacatggtgaaacctcatctctgcaaaacccacaaaaattagctgtgtgtggtggtgggcacctgtaattccagctacttgggaggctgaggtgggaggtttcacttgaggcgggaggcagaggttgcagtgaactgagatcacaccactgcaccatctgggcgacagagtgcgaccttgtcacacacacgaaaaaataatacatgttgaaactttgggaaggttttgaagcaagttttgattaaataggacttagatttcaggagtcagttttatcttcaatgcactcaaatttttcagataataaaattatttaatatacagtcatactaataatatagacccttgcaatagataagttggtgtgtatgcgtatgtccaacagaggattcctacagtcacatatattttagccataaaataggaaatctaaataagcacctttgtcttagacttcagcacaataggtcgaaccttcatttgaatgtgactagggactgccaagtccctactgcctatctctaccaaaggctgatctggaagtgaacccttttctttctttttttttttttttctagcagatgaatgttattgagtttatctgtggtctagtgatgatacctgcagagcagcttcatttttcagagtcattcagaaagctatcataagcttcttccttcttgtcaggcagagcaaatcctggcatgacaggatgtactgggagtctccgatagtgggaactgacaaagatgtgccttcagcactcccacaaagccatattgtctttctggaaatgaggaggatttattcagcaaatctaagtgtaaactaggagacccatcagataaaatccatacaacaaagatcaccaaccattttttcttcttctgaatagagccagaagatgcaatttaccttcttctctttttttccccagaagtgacaatatagagttagagagaaattatagagcggagattttgaaattcagtttcctccccaactaccagttgaaaaagcatagccttaggaaatgttctcatttgatttcctatgttttataacatgttatgtttgtgaatttgtgtgtgatgtgtggtggtggtggttccaaaatatctaagatatatagtaaatgagcaaacaaaaatagtttgtagcttttgatatatcatagttgtacatattttcgtgttacatgttgtattagttcatttttacacagctataaagaactacctgagactgggtgatttataaagaaaagaggtttaattgactcaaagttccacatgactggggaggcctcaggacgctgacaatcttggcagaaggtgaaggggaggcaaggcacatcttacatggtggcaggagctgggggatgtgggggggggggaagtgccacacttttaaaccatcagatctcgtgagaactcactcactatcacaagaaaagtctgagggaaatctgctcccatgatccagtcatctcccaccaggtccctcccctgacacaaggagattactatttggcattagatttgggtggggacacagagccaaagtatatcacatgtaatattttaatcatgtatatactgtataaatgatcaaatcagagtaattgggatatccatcatctcaatccttcctttctttgtgatgggatcattataattattctcttctagctattttgaaatatacaatgaattattgtttattatactaccatatactagaaaaaatgctctttaaacctcatcagaacacttgctaaattgtctttctatatgcttatgacaacagtaaaaaacaaagatcacatgtccaatattactgggctgtgcttggaaaaaaatattttactcttttttaaactttagccaattatatcttcaatagatatcaacactaatatcacatctttaaaaagtttctatgggttttagtaaggtatataaaaccatcaaatatattatccagagagacaatatattgacatttaaaatatgttcttactcatttatggtatcacctactgtcagaggtaaagtaaatttaatgatgtctaaagggattacagttgcttaaattggctagagttttatatgatttatattttcattcttttctggacattggaatcaagtagtaaattttgaaattttatattatatttttacttatcctgtttacagtatcacacctgactcaatttagagtagaaaatatttctagttacccttcgtcagaatataaacatcttttcaaattcatttcagcattttaattgtgttaatagaaatagttcaaaaatatagcataaacctcagcatgttctattttggagagaaggaggacaatgattgttgactctgatggatagtttcccaatgtgaaaagagtaaatttttcttcataataatattttatttcatttcatatggtactctaaaataggcaaaatatacctttacctctcttctgaatactagaagtagaagtaaatgattttattattgacattattaattatactatatttatgttgatatgatgccttacagttcatcaatcattttcatatattttaattcatttggccctaatagctgtgaccacctcccagaatagcccagtcaaaagaggttgaaaagaaaaatcatacaaaatacccatgaagtttaagaatttatggcacttgaaatatttgcccttagacaatgttcttagtatttctgagcctcagtttttaatacatgaataagaatactttaagtattattcttccacataatgggaataagaatacttactccatgaaatgagaataagaagacttactttatgtagctactgagggagtcaagtgaggaacaattactaatgccatgacacagtgtagatgctcaatactcatcattcagtttccccttttgaacttaaggccagaaagaagtgacttcagtggtggtactaaggagagagggggtgatttagccttcgcttaacattcatcagacctcacaccaagccacaggaagcaaatatacaatctctgaaaatagggaaacctacattcaagacaaatcctgtgtgtacctcctccccttcctctcccagaaaagatggctatgtctgaatcacaaaatgtaagcggtcgcctaaaaattcagaaatcaggataaattatattttacctcattttaacaattaaaatcaatgcaaaataattcatatgagcaaaatattaaaattttaagagaatacaagatgtaatcttgcattcgtgccactcatgttctctggcctcatccttatctccacttaaccaccaactgaaggactagaaagttggcaatgacataaagcacagcttcctcatgccatcttcccatgtccccccaactttgggatagtaaacattgcctgaatttataatcctgtaatatttttaaatgttttatcagatacatatgtttcaacaatatttgttccagtttagtgtagcaggtaagactgtgggtttcagagcatttccacctggatttgaattctgtctacactaattactggatatctgaccttgggaatgttactgaagttctctgagcctcagttttctcatccaaaaaaaaaatggggacaataatagtaaatatgtcatagggctattgtgaacatatgtgagaacattaaaaatatttactgtatgacacaaaatgttttagtttgtttttatatttaaatgttattaaaaagatatttgggactcatattttcctcatgcatcatcccatccctagaatttatcttgattgttttgtgtagcagtcgtttctttgactactatgtaatcaggttaactgtccattttcctgccagagggcatttgggctgctcgaagatttttcgtttattgtgttattttgggcagtgctgctaggaacattctcctcatgtttccttttgcaaatgcctctctgtttttgatgttgcagatggattttaccttgccatggcatgaaatccaaaggctgtacccacagattccgatatttatctcttgcttgtccacacctagtaataaactttagccaaagcaaactgttgcttgttactatgagcctaaagtcgctgtgctggtccctcctgaatccttttctatgagtcgcttagtactcttgctctcaagctctggtctgtaccgagctgacagctttttttatttctaggactttattgctgttttaaagtctttccactctgaatctgtacctattcaccccagagttagttgcatttctctgtgtctctaacctgagggtcatgagtctgactttgctcagtgaaggcaaatattttcttcctctgcagtctgtgttcattttgataatgatgcttgatggggggactaagcatccccctgagaggaaagaatctcgtttggattgtaatttgtcacagtttgtcttagtttggatttctttaaaagctaagcctgaggcgaggactagagagcaactagctcatttggtagctgatcacagggagcacaagtgggaggcaggggaagtaaggaaaaacgggggaaaacaatagtgagtgtattattcagctggctactgcagtgggaaactgttgttcaatcctgtgaagacccctctgaggaatgctgtagaatgtactcataattgtccctctgaagaataagaggctggggaatatgtctctggttcctgtgcctcattaattatttctcagggacatcaggtcccctcctgtgtgttggatgagtgagtttctataactttggacaaagtcgtgaggctgaaacacagagaagcagtgggtgcttgacctggtgggctgttagcatgcccgagactctccattacagggctgatcaagccagaggtaaaccaacagagtgggcagtgtctgctacacagttccaactggatttcccaattacctagtgctatggtcttctttgacaacgtgtctcaagaaggtaacctgtagctctagcccactgctactgaatgtttcatacctggtatcatgtggattataactgtagtatttcatttttcaggtattgtagtatcgaaaagccctatagcctgttttccttagtataaattttgattaaattatgcaagtccactttaaattcacagtttgatgttatgtacttaggaggcactcaataaatagttcttaaagcaataatttttaaatgactttttgtattatgtagacacatattaactataatagagcccttcggcaggaaaactgtttcttcaaagttgcaaagtgactgacaacgatatatataactagaagcttcaagaaaaatgttaccaggggccacttttaaactagggggaaaatcgtttttcacaataagctatcccatctcctccctactgaagcctctgatctgctatgattattaaaccctcatcttttagtgcaagaaacccagcaagctgaaagggaaatgcttttcagatttaaaaaacaaaaacaaaaacaaaaataaacttaatttcttttaggttgatgttgttatactaacttgccaatcagttaaacatgtatctgtcttttaaaaatatcttattacataagaacaaaagattttaagacatacagtttcaatcataaccaaatgtgtttattacttcgaattttccacagtaacttgaagccatctatgtacccatctccaattccatcgcttccccactaccaccagagataacggtggtcgtgaaatttgctttgttttatagtcttgctacatatatatgtattactaaaagagaaatagtcttgctctgcatgcttttgaacttcgtatagttggaatcatattgcatttattcttctgtgactgtttctttcaatcagcattatgttgctaagattcatccatgtctgtgactgcagcattatgtcatattccgtcatagaaataacccacaatttatttatgcatactactgttgatggatactagggtcgtttccagttttaattcttttcctattacaaacaaggttccttgtatacatgtaggagtgggattgctgggtcacagggcccatgtatgtgccctctggtatactctttggctcctttacactgctctactgtgtaccactgggagactgacctttgtagactgtgtgtgccaggcttccatttccaggtgacttccagctctctttggctgatggtgaaggattggaaactcagggaagacacaagagtgcttctcttcctctctttgtgtttcaggcagtatctttggcaacagctgcatatgctttgatgtcccccctccaaccagataggcccactatagctgcagcttccaatgaatgatctcataacctcattcactgaattcatgcaccctgccttcttctttcctcctcctccccattccttctcctcttcctcctccccatcctcctccttctctctctctctctctctctctctctccccttctctcccactcttcttctctcctctcccttcctctccctgtactttaagggtaatagtggcttcctgtggttgctaaactctgagtcactttgtcctccacagcttgtcaactctgttcttctctcatttgtttcaattctataatttaagctttctgatttaaatatcaaatgactttttgtgtctgcttagattctgactgacatgatgtatttctaagtttccaagattatgccaaattatttttaaaattggttacaccaatttaaattctcacgaacttaaaaattctgcttgctcccaaattctaacacttgacaatgtcaaacttaacttttggctactctgttgagtataaaattgtttctagctgtggatttactttgaattgcattaatgaaaaatgagtttgggcattttttcatggttccattggcaagttttaaatgcagacaattgtttagaatacattatttttatttaataaaactcattattaaatgtatattcctttaaggctgtactttgatttagtgtaagtagtacacaatttacctcagttttccgttttatgtattcactcatttaatttagcagatatgaattaagttctacaatatactatacagagtttaatgtgaaagtaagaaatcagaacatgttatggctaggataacttgggagcacagccttttgaaactggtttagtgttaggatacacatttttgtgtttacctctctttcccaccgccagtttcaccatcattcataagatcaatgactgtggtacattacaaatataatgtgaaattgtttacaagatttagtattgttcaatcattttgcaggcactatcatggaccttcagtgtcaataaaggattcagaggttccagaaaattctaggctatatcatgccttgagaagtcctatctaataaatatatagaccacttttagagtgtaaaggaattcgtaaaatgtgtcagcttaaaatattgaaatagcgagggtgacttttcctttccaaactgttgatgaagactgcagacagggataaacattagctctgtgtggacaggatagtgtctgttgtctgagattctggtcatactggtttaatacccataattgaaagagctctaagacatggctttgtggagaaagaaagatactacttgagagaaagcaagttcatatttccttttactaataagtgttcagattcctaaaatactgtaacagtaaaaagatattttgaaactttctaagaaagtgtgttctagggcggggcgcggtggctcactcctgtaatcccagcactttggggggccgaggcaggcggatcacgaggtcaggatttcgagaccagcctggccaacatagtgaaaccccgtctctactaaaaatgcacacacagaaaaattagccaggcatggcggcgggcacctggaatcccagctactcaggaggctgaggcaggagaatcgcttggcaggagaattgggaggcggaggttgcagtgagcccagatcacaccattgcactccagcccgggtgacagtgtgagactctatctaaaaaaaataaaagaaaaagaaattgcattctaggggtgaacatccacatgtacctgggatcaatccttccacagtcatatcttcacatcataattctaaccctaaatcatcaagaaaatattatgttagacataccatacataagaagggaaagagagctgtcctacataatcattttcatgtaaacctttcatccagaagttgaggtgttctgtcatccaaaggagtagctctcagctgtctggaaaacctttttgttcagaaggacatttgttgtgctttggtttaccttgggttttattgtgccgcgtgtgtgtgtgtgcaattctcattctattaaattattgtgtgattttgatacatttatgtcagggattagaaattttagaaatagattatttctggttttctgatcaatgtgtcctgtctatgtattttgtctttgtgcaaaggaataagactaaaacacaagttatatgcctgagtctacaactgagtgttgtaaaccaaaattccaaatgaaagaaagatatggggtggatggcaggattagagaattgaaagagtgaagaacaaaaggcttgcagacatcagtaaaatatgctttcttagttaaaaatagtaagaatgttttggaatattttacattaatttcgtttcccactttttctttacttttgcacaattaatgatttagtttttgagtttcaaatatttggccaagcttatctactgattgaattcaatttcttactggatgtgtgtactgcttttttgttgcattcatggcataaattttgtggacgcatttctacaaaaaccgtggattcagcatgttgcagagtactatggcaagaaaactgagtaacagactaagctgagacttggtagaaaatatctgttctcctacaaggcttgactctctactgttacttcaagaaaatattatgttaactatatgtgttatacttaagaaggcagaaggatactcactcctctgacgtggcgagatactcctcattacccccacggaaatactatctagattgtgaactcatccatagaatgactacatatgattcattttgtgatttccctaatatgtattgagtttaaactacattgaattccctggagtttgactagaaggttgattatccagtagagtttcttgtaagaaattcttatagcagtgaactattctttatggcagataaatcctacctgtgtatactgattttctttcttagtaccatagttatactcaggttactttttttttttttttttttttttgctcatatagacaagactacataatcctttttagaaagggccaatatcctatttggaataaaaacaaaacagttagatggtaccagggtcaccttaaattaacttatcagactatcaaccaaatcgaaatatgatttcagatgtaattaacccatttgcctagtgagatgcaaaggtgtgaggatttcttgaacacatctttctcttatgtagcaaatatcaacctcctgataccttttgtagtcagttcacataccatgacaatacatcctaaattttcaggtgtgatctaaccagcataggttcacataattggcatgacacggaatttttaaaatatcaactacctcaggaactttattcatgtgaatctggaagatcctttttggtatttgagccctttcatagattcagatgtcaaagtatttttagaatgggtctgtaaggcatcattattttgtaattataatcttattgattgacagcaaatgctgtgttccatgaaaatgttgcattgaagtgatcccggttagtgctaaagacagactgcttagatctaaagtctcatgagaagaaagaaagaacttaaaatcattttaaattcaccaatatgacgatacaggatctctcataaaatgctgaaaggttgtttttgctgccagacttttagcacttccgttttacgttcaaatgttgtaaaggttgattactcataagttaaaatgtttggtgcaaaatgtactttaaaaatattttcagtgttttttggaaattgtagacatttgattttgaaaagtaggccagaaatttggaagactacaagccatatgatggctgatatttcccatggaaaatataatatgcagctgtgctctgctgcatggtagaacaggagattaaaatatgagaaattataataccgtttgatgatgatattaatgtcactgaatcaaataaagtatgtgatatatcataagttaatagaacaacacttaattattgattagagcctacatcacattttaaattatcggcatgtttggtcttgcaaagggtcaagggtgactcgtagcaacagaactattctcctttcaaaaagttagcagaaagttaatatcaaattctatgaggtagagagggatttgggctgaggtaggtcaggaggaacgtaaagagatgtgtcatgtgtagatttgtgagctgtgggcacctgattttgtgtttaacagtatttacgaccaagataagtgaatgaagagctatgttcttatgaaccttaagtttattttgctaaaataagtaagaaaattcaaattcaaattaagctatatagtcttgcaaatttcaggtctctgaggggtgtgcattaataagtattcaaaagtattttgtcatttaattactattatatgaatttttatgtaattgaattattcttgaatgttgagaaactgtctttactaggctaaaaattcccttagtgatctcgttacccaattcctttgtgttccactctcagtgtctgaattgtcaccaatatgtggagtccaaattatgaaatacaaagctttaccagaattctgatgattttgaaggaagaaaattacagcaaattttgatcaattctctcctattagtgattaattcaatgaaccgcttgaatttcttatttcctcgtagaactgtatgtacatgaaggatagatacaatatttagtacaatctatagtgagatatgaagggaaggagattatgagaaaagaataaaactttattataaaaatgcttgttcataaagatttgacacaaaatcaatatgataagttttcagaaaatcaaacaatgaatttcgtatgaaacctcacattggcaaagcagttatgtgaataccaatattttttaaatctaaaacaaagcattttgaagtagtttcatgaataatgtactgaacctgtttcacgcaatgaaatgaacatcacagtgagaaaattattccacaattgtaaagttaagtgaagcttgcattataaggccaataatactcaatagggtattttctcatgaatttacactatagaatgtttttattctggaatttggatgatatcatagtcattcaacaaatacagagactaagtgatttttaaaatctttcaggaaattagttctttaatttcatctacatgtatgtaaaataaccaaacctatgtcttatgcatataatgtcattctaatatattgttcatgatcataatatttatatagaatccattttgcttggccgattgatttggcttggcctacaaattagtacagtccctctcaactttgacacttctgtgtaccatcagctccttcctggagtactgaaatagcatcctaactgctctctctcatgtagtcttgaccccatctataaatcctaatttcagcatttggagcaaccttttagaaagatcaattaaatcatctcacctcttcattaaaacgcctctcattctaccaagagtaaattccaaaccttttaaccttgacctacataactggaccatgcctccctcgcccatttcaattcagctttgctcttgtagctccaggcaagctagctctgtcttagttcttgcatgtaataagctttcaagtccctcggtgtctacttatttactgttccctctgtattagtccattctggcattgctgtaaagaaatacctgacactggataatttataaagaaaagacgtttagttggttcacggttctgcaggctgttcaggaagcatagcagcttctgcttctggggcggcctcaggaagcttctaatcatggcagaaggcagacggggagcgaggtgactcagacggtgggagcaagggcaagagagacagcaagtggggaggtgctgcacacttttaaacaaccagatctcgtgagagcccactatcgcgagaacagcatcaaggggatggtgctacaccattaatgagaaacaccgtgatccaatcacctgccaccaggccccacctctaacattagggattacaattcaacatgagatttcgtggggacatgaatttaaaccatatcactatctgactggaatgtgctttgctcctgcttctacttccgttttctgagcaatcagacagttattcattaactcattcattcattcactcactcatttgttcatttatgtattaaattattcagtgattctcaactctgggtggttttgccgtccaggggttatttcaccatgtccggagagattcctagtggcataactaaaagaagagatgtttgctactggtgtctagtgggtagagaccagggatgttgctaaacatgtaataatgttcaggtcaacccaccataataaagaatcatcttgtgcaaaatctcagtagcaccaagattgagaatctctgcaatacgtcaacaacccttctaggtgccaggaatatgacagtgaaccaaatgaatatggtctaaactttcacaaactaatccattaaggagaagatagtcaataagctggctaacaaacaattaaatgtatactttcaaattatgttgggtgctctcatggacaaggggacaagagagtggccagtgaaacctaatttagagcaggtggtgttgggggaggtggtgtttatgctaagacccaaagaatgaaagaaagactcagccccaacttatatatatagtaaacatttattgaatatcaatagcaaaaagttgcatttttctcaaccatgtctttttatggtaactggaaattgttcaaattattttttagaatcttttaatcatagattctttgctaaggggattagtctagcatttttctcttgtgagcaattaagttctcaccaagttagtgaatcctatgtcttatgtacttcctacttattactatgaaattatctaaaaaatgctcatagggttcctaatgtagttgaaaagcaaactgttgctgcatctctaatcagtaacaaaacttgtatttctgtcgcaaaataatgtaaaattttatagtactttttacatatttatttaaaacaattttaagtaagattgtttctttgtggaaggtcatatggtcccaatatagggatgtgtacagaaatacatatatacatacaacaacacaatgttaaacctagcaaaagagtggagtctctttcttttatttttcttactttttgagcaacgagacaagcaacatattatgcctagtcacttgaatcatacaccattaaaacattatgggctgagtgcagtggctcatgcctgtaatcccagcactttggaaggccaaggcaggtggattacctgaggtcaggagttcaagaccagcctggccaacatggtgaaaccctgtctctaccaaaaatacaaaaattagccgggcgtgtggtggtggatgcctgtaatcccagctacttgggaggctgaggcaggagaattgcttgagcccgggaggcggaggttgcagtgagcagagatccgccattgcactccagcctgggtgacagagcgagactccatctccaaaaaaagaaaagaaaatatgaaaagaaccatttttaatgtcaactactgctttgatgctaatgtctgtcagttcagtgtctatgacttaccctttattctgctcaaaaccttcttgaattttccatttgaatatcccacaggctcttgaccccacttatccaaaattaaacctatcttcctctctactacacctcttcttataatctttctcttgctatttctaaacatttagtgggccaaataaataccctaggagacatgacttgaaaggggtatgaagtttagataatgttcggcttcttgatctgatactggttaaatgggtgcattacatttgtgaaaacttattgagtcacttatgacttacagattttctctatatattttatattttaagaaaaaagattacatataaattctagaagccaagctacacctttccctcttattcatccagcacatttactgagacagctagattttcataatgactgtccattgttgaatatttgctatatctttgatattgttatccattattaacttccttacctggtttgacagttgaaaatttctgtggtgcagctattattatttccatttcacatatgagcaaaaagagacttagagtggttaagtaacttgtctaagttcacacaacaacaaagtggcaggagtagagtttgaattcgagtcaatatttataatcactatgatatcttgcttctcgtgttccagtcgcattaaaactatgaatgccactcccactccttatccatccttactacctggcttcactttagatcttcaggtcttctttcctatattataatgataatatcataagaaatccagtgcagtttagtctattccaaaatcagtctaaatactgccaggattagtgttcattccacaatataaatctgattgtgtagtttacttaaaatccattaacacagccgttagcaaccttagctacatgtgaaaatcaccaggctccacccaagataaattaaatcagaatctctgggtatgagggactgggagtgagcattttaagaaagctccctgggtaactgtaatgctcagctaggcttggaaaccaatgctttaacgtttccctacagcttttattataaaaataaacccctcagcattgcacaaaatgccctttgtaatttggtttttgccttcctctacctcgcctcctctgctgtaattcccttcttctcccactttttccccaccctacctacatacatttcattgcaattattcaaaagtctttgtttcttctgaagagttatgatttttataccatacccttacacataccagtcttcccctctaaatgcttagttacattatctttgtacttaatccttttagttgctgataataaatgaaaatttctttttagtttctttttttttttttttttttttgagactgagtctcactctgtcgcccaggctgggctgcaacctgggctgcaacctccgcctcccgggttcaagggattctcttgcctcagcctcctgagtagctgggactacaggcatgagccaccaagcccagctaatttttgtatttttagtagagatggggtttcatcatgttggccaggctggtctcaaactcctgacctcgggtgatccacccgccttggcctcccaaagtgctgggattacaggtgtgaaccaccgcacctggccaaatttctttatagtttcttgacttgtttttaatttagaaaatttcccacgtatatagacaccatacaatttataatgtaaagctgttttcctatatcaatcatgttttaccttttttctctttctcctatatatgctgcttcctggaagatctaggagctgacaagtgtctttttatcttgctttgcaaatctaatcttttgccatttctttttatagaaatgaaagcttgtatcatgcatactaaagatggcttcttctttgggctgtagggccatttaatgagttatattgaactgaatgctttataagagttcaaattagtacattgggatactcctatgccagggatggattaatatatctgtccacatatatacacaaaaatgtgtgttgctaatttccaaattagagaatacttattttgaattatcagtatctatgacatattttgcatgtggtatatatttggttaattaaactgagttaccacttgttttatcaaaatttggtgtctttctaaatatatcatgaatatttttcttctaatgcacctcgctttctgctggaactatagaaacactttgtaaatttttacttgtgaccactcgaacatttacaggacattttacctgaaaattttttctgagtcagtgaagaaaatgtccatgtttctgcgtgtgtgtgtgtgtgtgtgtgtgtgtgtgtgtgtgtgtttgtgtgtgtgtgatgcttgcttatgaggaatttattttggctatggttctttattttgctattgcactcttaacattcgtatgatatgtattattaccctataaatacttacacaatatattcttacaaaaattaatacaaagattggccaaaatgtaatagcatatgtttttgtaaatagaatatccatatacagtcataataaaactgaagagcgattttatacttttccataaagccaaagattaagggtgtaatcactgcttataatttactaggaaactataaaacagataaaagtagatgaaaggatattacaaatatctcaataagtcgtcctccgcaactgaccccttgctttacacatgttcagacactctatactaaactctgtttatttttctattttataattttctatatgatcgtaattcagcgttttcctataatattattagtagtgctaccaacagatattacattttatgaaaaattttaaaaagggcacatgttgcataaaactaggttttgaaacagctgcttataatgctgatatttagcacatgactaggtggaatatggactttttaatgaatattttttcaaagttaggtaatttctcatcagtcagtttcaaaagcaaagttaaaatttgtgtttcaaaaaactgggtatgtttgaaaattgtatttaataatggattttgagagttctcaatagcaaattgcttggctgactgtagtttaagaagtaataattttgaagagaagttgaatgcaggtactttcaaagtgttgaaatttttaaagaagaaaattaaccttttcagactgtacacttgttcatcttttatattcttttccctttaaaaaagaattgtagtaagaagggagattaccttctgtcattgatacaaattttccacagtataaatgctgtttatcacatttgtataatatacacttcctatcaattttaaaaattacatgttactactatttaactctgacttaattattttaaatataaaataattcattcttttataaataatcaaaactatagttttacttttctttcaaaatataccactgactacattacagattagattttttttagtataccaaacatattttcatcttttggagttattggaagagtagctgcttactgccttacattttagatttctctatataacaagcattttcatcattttggcttattcgagtaattcttaataaataataatacaatatttacaaatgagatgtcatttgcaattttaacacttcataattttaacaaaatatctttactttgagttttttactttccttttggtgtgacattttgacctccaatgtgatcttcatttaaaggaaatatcaacgaaaattccttttttttcatttgctatagatgtacatataagatttacatgtgtaaggaatatagagcaataatgaattgagctattcctcataatcacttcacttaagaaatagggggctgggtgtggtggcttgtgcttgtaatcccagagttttgggaggctgaggtggtaggattgcttgtgtccaggagtttgagtccagcctaaccaacatatcaagacattaagtctatgaaaaaattaaaaaattatctgggcatagtggcatgcacctatagtcctagctactcaggaggctgaggcagttgaatggcttgagcccagaaattcaaggttagactgagagctatgatagtgccactaaacttcagcctgggaaacagagtgagggcccttctcttaaagaaaaattgactagaatatgactaatactctagaagccctcctccacatgccacccttcccaaatgcaccactattctctcttcccaattttcatttttgtatttattattcctattcataccaacacaattttaccagatgtgtatgtattttcagcaaatatttttagtttattatgcacttaattgacactatggaagaacagcttttaagatattattccaacttagggaattttaaggaaataagacctttgtatataaaaagttaaataggaataccgatttgcttttgattagtgttaaatcacataagtttaaatttgtaggagatcatagagatcagaaagcccagtggttcacaaactttcttttttttatcaacaaaacctcttttaaaaatatatagcataaggaagacggaaccataaaactgaaattacagcagctcaactgaattgtgagtttcaactgaactcaatttcaaacccacaaataagtcaaactcttactttactgagaatatatttggaccacacagagtttaaaaaacatgtttaaatttatttagcttatttataccagaaccaatataagaatccataacattctgcattagaattaagtacaaacactttttctttctttctttttctttttctttcttttttttttttttttgagacggagtcttgctctgttgtccaggctggagtgcagtgacgcgatctcggctcactgcaacctctgcctcccaggttcaagtgattcttctgcctcagcctcctgagtagctgggactacaggcacgtgccaccacgaccagctaatttttgtatttttagtagcgacggggtttcaccatgttggtcaggatggtctcgatctcttgatctcgtgatccgcccgcctcagcctcccaaagtgctgtgattgcaggcgtgagccaccgcacccggccgtagaattaagtacaaacactttctatgatattatactaaattaaaaacaggaactcaaaatgatacaaactgaactgaaataaaataaaataatacagtgaatggagtccacaattaaaatacctgcaaggacctgaaagggaatggaaataggtgaagcaaagatctaaatgcatacggacattgtgtaaattggaaagaatactggcaaatggcacgcctgtgcccagtctaaaatgggcaactgctaatcaattcagtctagcagtgtccatgtcagaatgtagagctatttttggccatatattttatttttcaagaggaacttaagaatctggagttgtatgtaaaacatcccagtgcactatatatttgcctcataagttgagcacttttttttatgtgtgcatgttgtctactggtgaatcccaagcacttggaacagtgcctgatatatagtaggcagtgatgtatatttggtgggtaactggaaaaaggttttccaattaaaaattctgtgcaagcctgaggtaggagttgggcaggacttatttcccattcccagaggataaagtgaagaaactggcaggtaccagcaggcagcgaccaacggaagtgagaaaaacagcagaaaccagcagatggcaacaaaagtgatccccagcagccctcattgcatattagcagaagccactcccaccagcaccatgacagtttacaaaggacatggcaataacccagaagttaccacccctttcctagaaagttctaaataacctgtctctcaatttgcattaatctgccacttaatttacatgtaattgaaagtgggtataaatggatataaatacagtagccagcagcccataccctgccaactttggaggcactgcctatgagttgtccctatttcacaaagcgcagtaatgttcactaaaacatagctgtttaacgccactggctcgcccttgaattctttcctaggcaaagccaagaatcctcccaggccaagccctgattttggggcttaacctgtcctgtatcaaactagccaaatgtatctcaggcctgaattagatcaatggctaccagttcaaatcttttgttttagatattagagaggcaggaagtgactctctactgtgtagcatgatactcagagcccaggaacttcttcagaatcccagtttgacttccaaaacgccagtgtcttgcttttatttactcttgtgggtggcagtaagggaagggagcatatctccttagcaaaacatctcatcagaacacggtccatagcacaaattattaattaaagacttacgtggaggctcaaatatagagccaaagcataaccatttaacaattatccttcaaagcaattttattcttggcttttggtggaaaaaactcttaaaaataaaatgataattctacatatgggatttgtgatgctatttagcaaggatatgctttattgcctgacatcccctttattttggcagaatactatgagattctcattacgtttccatttgctgcggaaagtggagaaaagttcagagggggaagactaattaaaaaaatggttgtctactaatccattgaactaaggcttcttaacagtcatgctcttcttaatagtatgaacacacattttgtattgattgcagagaataaagaaaaagaaatgacttgttttgaacttcaaaatggaaaaaatgaatacaaaatccagataagcctttgggcataccaactttttcgacttgtattatataacaacagttggcaaatgatttcaagttgctaaagcatagaaaatgatatttatttgatgaaagctaataaatcagacagaacaattaatggataatttggattgaacaagtatgaaagattccaccaataagaaccctcctacctaaaactatgaggtttttaaatgaaagactctcctaatgtcatagattttctctacctgtgctttatctgaaaataaaaatcacagcttttcccttcacctcttcattctctactcctccttatatttcccctttccttcttccttccttctccttcctttactctttgttctttttattcctgtttgttctgattacctgtgatgttttctaaaaacattaaaattttggtcaccattaatattttttacaatgaattaagaaatttatctcagaaactggatttgaaccaaagccttgttttgaacttctaataagtagactgaggaacaagcacgattttaagggcatatttaataggcaaaataaaaaaaacgcataaaatgcccagtcgttgatgaaaaaaatatatttttgtaattgctgttattcaggtgcttgaaggcccatgttaaagtatcactggagaagataaaaagcatacttcctcaatgtgaaaaccctcaaaagaaagggctataaacactttgtcctgaatatttgttgtttcaattgctgacgtttaacttttcatctgacagcaattcaagttctgcgtaccacagtgttgttgaatctttgaatctgaaaaatattttccttgcagctgtgataataatgtatctcctgataatgcatttaatgtggcaaagacacttttcttaaacacagtgaaaactaagtgttcattttgtcattgtaaaatgagacatgtttagttgctccaaattttaacttgggtaaccttgagacatagttgcacatttaacatcctatattttgcttgtcttgcagtcaagtgaattatcttagttactggagtgttacgtgacaccaattgttttgttaccactgctttaaaaatagctctatccctagaccccatcagtagtgtgtcttttagggccccgatttttttctaatctataggttagccctcaaggcaacgtggcctctttctgtttacttctcattattcctgtaattccaattctacatgtgactctttgctttattttaaaacagttgtgcattgctgatgagccttgaagtcaccaggggtggctggtgtcaatagtgagtctgtacatggctatttttatccataaagcagtttactttctgtatgatgaaaggcgttaaagtaaaacctgcctcctattataccctaggggtgtaatcaagagggatttgatcatagcataccaattaagcaggctacagcagactgctctgggttgtactaaggagtagggtgttctccacagatttttgaaccctttattgcaaaagcatcagggcacagcacatctaattcttttcatcgcacagctgtgtacataaacctctgtatacagtttctgctcagaggctgtgctcttagatttaatttttcttataagtcattacagccgtgatcattcatttaaacctcggcaagataagcattactagttcccagtaaactagatgatctcttcctctagactgtattttctcttatgaacaattataagattacaagactagcaatgttgcttatttacactacactacacacacacacacacacacacacacacacacgttcattccaagccagcagccagctcagcatccttgaaagctctcaacctcagccgaatatataaatatcagaattctctctaccaccctcaattagaaaatgttccagttctgcttttaaacttccactccaattcttcttgctaaggcctggaagcctcaaggtttcttgtattgccttatatacacctggattattcctctctgttgaaaactatgtcccattggaatgggagtgtctgaccagctggtgcccaagaatgctctcagaaaacgatcttccacaagccagagccaaaacccaaacccttgacccttatcaaccttgacgcccaaaactccaggtgtggattagcacagtaacccgcaaacccactcctacacgaaggaagatttttctagaacaactacagctctccttttatatttttgggtaattcagttatgatgaactgaaccagaagtataaagtatttgctcagttcagttcttaatctttgtcatggtattacaatactaaaccacttgctttgtcactttcatatagctcataaaagaaaatattactgtataaaatagattctgtagtccttcacttgttgttatggactgactattcgtgtttgccccaaattcatatgctgaagccctaacccccaatgggacgatatttggagatggaacctttgggaattaattagggtaagataagcacatgcaggtggggctctgatccggtggcccgtgtaaagaaaacaccagagagcttgctcttgctttgccatgtgaggacacaggagaaggttgttgtttacatatcaggaggagagccctctccagaacttgaacacgctggaacactgacctcggacttaaagcctccagaactgtgagaaaataaatttctgttgtttaagctgcccagtctatggtatcttgttacagcaggctgaaatgagtaagacacttgtattgtccctgcggttgacatctgactctgtaaaaacacccatgcatacacacacgtacacacaaaacaacaacataaccagtaagataggtaatcaagtatatggtaaatgcacctgattgcaataatgtgcgcatacccttagaatgaccctgtactgcagacacacctgaatgtgttttccgagctacggaatctgggagtagcccagcaagagagcccttccttgtctatgaggaacatctgagccccaagtgcatcccgtggaacacgggccatacatacagcggattgaggccccgagttttgggttggatgaaggttgccaggtgaacgtcattaagggcagagggttaagtaaaaatgctatataaactgcatgctgcccgcaagcagcgttggtttgcccgctcatcccaccgccgccatcactaccactgtgctgcgaggctatcttgtccagtctgccaccactggatcgtttctacaggtaaggcacttctcctgtccagcccaccactactgaattccctcccctgtatgtaaacctctaataaaacccaatgcctcgtttgctggctatgggtttcttcctcagtctcttgaacctgatgccttcgctattgagggttataggggttcagtacaacatcatgatgtgaacaaacgcgtttatttgggcagatgtattggtcagctctcaaaacaataatatcaagtaataatcattacctccaacttaatggttttaaatagcattaattctcatggtcatgcggggtttggctgacctaagttgatctagatttggttctgcatcaggctggtagttgctaggcttggctttcagcggcaggtttggtttggatttctttgatgtgtcacgtccagaggcacacactggaatggcaccggccacccagtgcatgttttcataggttgtcactagatagcaagcccaaacatgccagcccatctcaaggctctgctcctgtcatgttttcttaacaccccgttgaccaaaggctatcacatttcccaccataggctagatatgccatcctattaagtaggaatgagaaagtggggaccaataaatcaacctacagtaggaaaagtaggggattatttagtagcacaaacagatgagtttcagtgggcttgctgcttttttgtggatatggaagaaatacctaaaaaaaaaaatttccagctccactacaatatttaagaaaaaacttaggtgtgttcatagtttactactttgcttaataaccccactgtttatcacagcaaatttaatcacctctgaggggttttaatggctttgataagacaaagagtaaattactgaggaggaagacggtcactttcacatcctgagagatgctaactgtgcaaggtaattcacatatatcttgtaaacatgtttgcaaacatatataggagataggtggtattctcattttttaaggaaagaaatggaagacatgagagaatgagtaatatgtttaagaggacacagctggaaactggtataatctggctctaaatacgggcttttgtgttacattgaacagagataaattcagcttatgttaaggaagcatggggtaaaaaggtcaagaaactgaacaactgaataaccaaataagtaggcgaaaccatttggttactcagttgtctgaccaaccgaataatcaaaacaaaaatgtcacattagaaaactacgatcagtgtaattttatgaataattgaactattgagaccatagtgtagcagctgatctatcacgtcatgggattccatcattcattctcatgaattaactactctcagtccttgcttttagcattacctctactccctaatgatacatgatttttactctaacataaacttcccaggagaaaatgtctgataaatatcataaaatcatgaaaatatctgataaagtcatcatcctgcatcatgtgtgggagacttaagtttgtaactcttcccattcctttaagttggttttcagccttgcttacacgatcattgtggccagagagacagaatgtgccaagcgtgtaggcctgagctgggaaacaatgtcaataagtaatacagtataggggatgagaagtttgccaaataatacttggtgtgtaatgttatgaaagaaagggggcattagaggccgggtggctcacgcctgtaatcccagcacttcgggaggctgaggcgggtggatcacgaggtctaagagatcaagaccatcctggccaacatggtgaaaccccgtctctactacaaatacaaaaaaaaattagccgggtgtggtggcaggtgcctgtaatcccagctatttgggaggccgaggcatgacaatcgcttgaacccaggaggcagaggttgcagtgagccgagatcgcaccgttgcgctccagcctgggcaaaaagagtagaactctgtctcaaagaaacaaaaaacaaaaaacgaaaacaaacaaaacaacatggcgtggggggcatcagaaacacacaatggtacagatttaaaagctcctcgggtgatgctaatgtgtagccagggctgaaaacctaaaagaagaatgtgcagtaatgttgccagtactggaaggaagtgtctgagttttgtctagtgactgacagaaggctatgaaactgtaacagttgtaaggggttgagggaaagccgaggccagatcatgtggatcatgtgcaaattgtaggtaaaatgtaaagctgtgagttctgtggcctcactgaggaagcatttctctgcttttcaggaagtaacttggagttgagtgctctatgatttccaagttgtcagctaacacattgaataactgatgaattatggttctgtggccttcatttctgtgtcacgtggctatactgttcattggcatatgcaggcagtaacccccaaactatgacgcgagaggatggcaggattccaggtctgaagagaaaaaatgattaggctggggaagaatgatttgaggaacctcaaatcagactatggcagcaactactaggtgtagggcttcatgccatccagccttggagttgtcagttttctattaatctttgctaacaataaaatactaatgggtacataatgtagtgatttacagatgatagactctccttatgttttcattttgtctcaacagagtccagcatatttcatccaaattttactgatcagagaattgaggtacagacagaccatgaaggtcatgacagttggaaagtgttggagtagaataaggaagcctgatttttctcatttgtcctacatcgctttattagattgtcttctccagccttacctccccgccttataattcttgattttcatgaaacctattaaagggaaagaaaaggaaaactagaaaatttaatttagatcacttttaaaaatcactttgcatcttggactgttgtcataagttataggattaaatcctaatgattctaatgttgttaggccatcttaatttatatgatccacttacctctcagtcttctctcactggctcactcacctgccctctgtatatgaggggattgagaaaagtctgtttttcattatgtgtagatacacagactggtgtgtatgtagcaggaataaatgttcgcaaaactcagatgtggaagaagtaactctgaatttttgccctatttttgaactgtactccaggccagtgctgtccaaaagaaatataagctatatatgtaatttaaactttttgagtagccactttaaaaagtgaaaataaacaggtgacattaatgttttatttagctaaaatatttcaacatgtaatcaaaaaagacttaatgagacattttacgttagtgaaaagaatgtactaaatcattaaggttggaggatattttacatttacagcacatctgaattcagttgccatattttcatgggttaaagtaaacttgttctcccaaaccaatgaagttatggttaatggaagaatattaaaaactgtttgttttcaatataaataaaattgaagcaaaaataaagcaaaatgaaaatttggcttcctcagttatgctagtcccatttcaaatgttcagtagccacatataactagtggctatcttactggacaacataaccccagatcatgataaaacgttctgatttcccgaatttcttttttttagacaatctgggatgtttcgccttcttaccaaagaaacaaaaaggtgctggtactttttgtttgcttgtttttcagcagttgccattgaaatgtgtttcttttggagttggataggaaaaacctagattcttcctccaaggtgtagtctcaactgtgccccaggcatcactgtttatgatggattaagggtgtggcttttcccagataatgagtccccctcccccaccccccacaggccttaatatctacagctcctgtcaatagactggcctttccttccccgcgaaaagtttgagtcctttaagaatctaggtctaaggttaatttcaacgaaaggtttattttctctttctgcgaggacctatggaactacccagaacatataaagcagtccacaaggctcttcaacagcttcgtaaccgggcactgctagttcagaaactcactgacttctgaatgtccatttcacatttgcaggctgcttctctgagtcctgagctcttgtctcaagatgacttggctcttaattgttgtctgatttattaccggtttgctttgcagtttaggtgctggacaatgattcttagaaatccccacataaggatctacatgcagtggcagtgaatctcaataactgccttttcttgaatctgaacttaatttatatataaagcctactttccggtagatcctgcatatttcatctcagccaatttaggactgagatgccccccctttctctggggttttgtcttaaatttctggaggggacctgattgtcacgcccctccgagtgaagagaccaccaaacaggctttgtgtgagcaacaaggctgtttatttcacctgggtgcaggtgggctgagtctgaaaaaggagtcagccaagggtggtgggattatcattagttcttacaggttttgggataggcggtggagttaggagcgatgttttgcgagcagggggtggatctcacaaagtacattctcaagggtggggagaatgacaaagaaccttcttaagggtgggggagattacaaagtacattgatcagttagggtggggcagaaacaaatcacaatggtggaatgtcatcagttaaggctattttcactcttttgtggatcttcagttgcttcaggccatctggatgtataagggcaggtcacaggggatatgatggcttagctcagagtcctgacactgatacagtgccaggatttgaaggcgggtgtggcttacctgatttcatgtacaattcatcccatagggaccttgttccttggcctcaagttgtaggccctttcatatctctgtacggtcaagaaacatggtggttcccttgtcattcttcatcctccaaaaacccattgagcactgtgtttgctggaggcatgtgggaaattattctactgtaccctatatcctgctgaagtgcctgggtactgggtggctagctcatgtccatttgctaagacacatgctcacgattcttgcctgggtctgacataactttggagtcttgttgcattcctgggctggactctggaatgggacccaattacttctgcacctggatacccccaaccttctctgttgtggtggcggttctttcaccatcccctcctctcaggaacacactcttgtttctactttacattctccatccagtccaggaaaatagtatctaggctcagagacggagaaaatagtgtctatatttcacatttttttccaaaaaaaaaaattataattttccgtgcctggacttgagaatttgaaaactccaaaatcctccaggttcaaccacattgttcccaattacaggattttcttattaaagttgaatagtgttccattgtgtgtatattccacatttttgaatccgttcatctgttgatggttacttaggttgattccatatcttgtctaatgtgaatactgccacaataaacacgggtgtgcagatatctacttgatatactgatgtcatttccttaggtatgtacccagtagtgagattgctggattgtatggtagttctatttttatttttttttgaagaacttcctgctgttttccataatggctgtacctatttatgttcccattaagggtccaaggtttccctcttttccatattctcaccaacactagttatcctttgtctttttgagaatagccattctgacaggtgtggggtgatagcatattgttttaatttgcagttacctgactaatgataagcattttgtcatatacctgttgtccatttgtttcccttaagacatgctcgttgagacatggacacggggaggggaacatgacagaccggagcctgtgggggtgggggcgtagggagcaaggggagggagagcattaggacaaatacctaatgcacacaggacttaaaacctagatgacgggttgatagatgcagcaaaccaccatggcacatgtatacctatgtaagaagcctgcacgttctgcacatgtatcccagaacttaaaaaaaataaaaaataaaaattcagttccttaatcacagttgccactgtgattttactttgtcatattttaaaagcttttttatttcaaaaaaaaagtctgttgaggtcctttgcccatatttaattgggttgttgtattgctattgagtttaaggtttcttatatatttttggatattaatcagagtgaagggacaactcatggagcaggagaaaatatttgtataccatatacctgaaaagggattatttccttggctgtgcagaagctgtttaggttgatgcaacttcatttgtctatttttatttttgttgcctatgctcttgggttcatatccaaaaaatccttgcccagaccaatgtcataagcttttagttgatgtttttttttttttttttttttttttttttttgagacagtcttgctttgtcacccaggctggaatgcaatggtgcggtctaggctcacagcaacctccaccttccgggctccagtgattctcctgcctcagcctcctgagtagctgggactacaggcgctcaccacaacgaccggctaatttttgtatttttagtagagacggggtttcgccatgtttgccaggctggtctcaaacccctgacctcatgatctgcccgcctcaacctcccaaagtactgggattacaggcatgagccacctctcatagtccatgttttcttctagtagttttagtttcaggttttacctgtaagtctttaatccattttgagtcgattcttgtatataacagataagggtccaattttctttttatttatttattttttttgagatggattcttgctctgtcatccaggctggagtgcagtgatgggatctcggctcactgcaagctccgcctcccgggttcacaccattctcctgcctcagcctcccaagtagctgggactacaggctcctgtcagcacgcccggctaattttttgtatttttagtagagacggggtttcaccgtgttagccaggatggtctcgatctcctgacctcgtgatctgcccgcctcagcctcccaaagtgctgggattacaggtgtgagccaccatgcccagctgtaagggtccaattattaatattcccaattgaatggaagaagtaaaaggaaacaaaattaaccatattctcacttaaagtcattgttatcattttggcatatttcattgggttcctttttacccgaaatgagggttttctgctatttatttagatgtgatcgtgctatatttatgacttttcacccttttttactatcacataagtgattttaggttattatagacacactttaaatgttcacataatgaccacttattctaaagttaggcatttagttttttatttttgttgttctaaataacccagtagaccattttgtttccttttagacagcttccagcgcatgaaattattaggtcaaaggatattacctttttttttgagacggagtcttgctctgtcgcccaggctggagtgcagtggcgcgatctcggctcactgcaagcttcgcctcctgggttcacgccattctcctgcctcagcctcccgagtagctgggaccacaggcgcctgccaccacgcctggctaactttttgtatttttagtagagacggggtttcaccgtgttcgccaggatggtctcgatctcctgaccttgtaatcttcccacctcggcctcccaaagtgctgggattacaggcttgagccaccgtgcccagccaggatattaacattttttaaagggtctttatatgtatcgcaaaaatacttagcaaaattattattattattattttttaccagtttacactgcccaccaagaagctataaggacacctaaattgtcacataaaactgtgtatggataaatatctctattttataaaccacttggtataaccaaaatcctgcttttgagatattaaattttgaagctaacattcttagcatgtttttaaaataatactgacttcatgagctaatacccataatgataaaatgattttatattccaggaaagctgccatgtgggattgaatgttttatatatgatacacttttatctacatatgttgttatacagtcattggtacctttttattagatgaatttatttcatattcagtttccactgaattgtattcagcttgactacaaattagtcaagcagaataagaatgtgagttttattgtgactaatatatatttggagtctagatttggagagacaaggggtgagtaaaactgtgtgcctactacctgaaaggaaaggttttttttttttttttttttttccccctcaagggaaacaattacggagactgcccaggcatttaatattttattgaaatattctaaaccctcaaatttcgcttctacattttatgtgatgcatcagaaaaacactattttatttgttttataattctccaatagggaaatttcaacacattgtaagtttctttatttaacaacatcatctagcttttaataactgactttcatacacatttttaaaagcaggctaatcgttatagcttaatatatttttcatgagatttagtgataacatgatcacttataccagtagtttatctcctgaatcattttaaaaagtaatgtgcatgttttctttatatttatatacaattgggaagcttaatatttatgaaaatatgattgacttttttttgtcatttctcttcaaagccttaggctttgcagttatcagtagtgcagttccaagatgcaaagtcataaacttacctttcattctctttagtaggcttaatattttgaatctagccataggaagcagcctgaaacctctaatcgaaatcaaagataacaccacaggggtacaatatctctaatttgtcttggaatgatgcggtagcttcccttgactgctgtgattaaattcattctggtttgttcagttaatgagattagcacatcttaacccataggaaatattgtctttatgggcctatgactctgaacagattagcatcatgatcagaaaaataatttttaataaatgattacgtgtgagtggtgctaggctaggatccctacaaatctggcaagagcatattccttgaccttcagcattatatgactttataagacacagcattttctcaggcatgggtataaatacagttaaatatgtactataaaactaaagaacagcctgaaatttaagaactacaagaatttgtgcttgtcattaagctggagataaagttaacatcctgagaagatgtaaaggcgacagtgatacacttctccttgtttggtaggatcatttccacacttgtctgtacttggaattgtaaggtgatgagtcccttaatgatttcttattgcaagtttgaacctagtgtatttcatggtaatagactaaggggaatgagtatatgaaatgagttccagtgtattgatgaaacttagagttgcgtagagtggagcatagcttagtagaaacttgagcaagttactgtagcacatggtcctggttccaattccagcaacatctgttagttttaggacttggtgcaacttgttcaaattttctgtcagactctccattggtttaaaaaataaaattcaaaatattgacaaatattgccttcctgaattttttggtgaatattaagttagatgatgtatataaagtgcctggcccatagtaagggctcaataaaagtagctgttggtaccgcttttaactaattgttgttaaattgattggttaattatatatttccctgccacttaactgtcactcaacagcttttcctcatttcctgcctacctgattggaaatcattatgttgaatatgtctagaattatcactgggcctgctgtattccctgggtggtatgtttgtataggttgaaccactaaagaaaatcttttcggatgagttactttcctatgtcaccctactatttcctagtgggaactttaagttccttcagtctggggtcaagactagtcttagtataggggacattgggaatattgaggatggcatgtttaagtaacattgtatgtattggtcaagaaaaaacaggcaagggatagagtacatcaaaaccagaaaacctatgtacttacctttccatttctgtctttattagatatgttgagtttatttcaagtgcctctatagaacatctacagaacattaatattaagaatatcatgaaaagggatacatttttaagagcctaaattttggataaaatggaagtcattttcttttttttttttttttttttttttttttgaaacagagtcttgctctgtcacccaggctggagtgcagtggcatgatctcggctcactgcaacctctgcctcccgggttcacgccattctcctgcctcagcctcccaagtagctgggactacaggtgcccgccaccatgcccggctaattttttgtatttttagtagagacggggtttcaccgtgttagccagggtggtctcgaactcctgacctcgtgatccacctggctcggcctcccaaagtgcggggattacaggcgtgagccaccgcgcctggccatggaagccattttctaacaacaaatttaatttgtgaaaagctggtagcatgttaactctagaatgacaattttttaaaaggaaaattccaaagttaaagggaaaaaatattggggtagtgccagctagtatcaggatttatactttaaaaatgcataagaaagaagcaattaccagtgtccaaataagaaatgagagtaatagaaaactcagatttcattgtattataaatttaataaataagttacacaattgccgttcagtgcctgaaattgatttttctttttttgaggtcaaacttcaaccatgtatatgaaatgtaagagcaactttctaagcagaattaccctttctgatttccttgggttccttttggttctttaatctgtatgactaagagtgtggattggctgacattatgagatgcaattaatttacatgcttaagttaggactataccatcctgtttccatccattcttgatcacaagcatattacaaatgctgtgctggattatctttactattaagacatactgcagaaagccctgcaggtaaagaaaacaatctagggcttaccttagaggcaggaagaattgcatgttaagaaagctgcatacactctggctttttgctctttgagtttagctcaatgtcttcctaaactttggtgtgcaggaggtgactacgcagtatttaaaatctaatccatattatgtgtatagtatggatggtatagcaattttccaggtggatttttgacaatattttattttttactattcatgttgactttgaaaaataactacagggctagatttgattcaactgtccatggttagaatttttaaaaaagtttttgactctaatacaactgagttccatctacagaaagaatgcacatatggatacggctgtccagaagatcaaatatccttgtactgaagtatatctatatttagtcattattttataaaagtagtagaaaacaatagtggaatataatatgtggtctttggaagaatgagaaatcatccttacccattaaacacagacccaacacttaatgtatttccattttgatagtgacaagttttgggtttgggatgatgtgtcagccagggtcagttaacagacagaaaccacttgagtgactgtagcagaaaataatgtaacaagaggaattgggatctaggtattgaaaaattgacaaagagaagaggtagcaagtgcacaaagtagctaccgctcctagggctgggaagacaaaaggttagaattactaacacttagaacccttgaggaaggactctacaaagctgagctcaggtctgagtagggggctgctacgtggctggtgctaccctctctgggatagcaggaagggcccaatgggactgaggcccggacctctgccagccaggtggtgctggtatttctgcagcaggggcgatgaagctgattctctaagcttttgaaaaacaaaacacaagctaaattgaatagcttgttactaaaaagtgctgctgcaggcatgaagaagcacgtctagggaactgctaataaggacagtaagtgcatgggaagctagtgtgaatgagtaaatcctttgtccctcctccaggcttgcagtctccctctattgctccctacctttagattctgagagtcagtcagtaaagccagaagtacggtttgcagagtctttgcctcagcgttgcaaagtagggtttagaagggtgtgttggtatggctctgaggaagataaaatctctaaccagcatgagtgctaatatgtctaataagatatatggaaaataattattaagtatttgactgaatttcaaggattaaaaagcaatacttaaggcaacaaaaacatcttatatttccattaaagcataatttttcttacagctccttcacattggcaaaattagtttgccctcttgaatttttcaaagatgtgaattatggcaagtaataattgctgcctactattgaatatctggatgttgtagaactgccattgtatcatatttaacttatttttgagagtgttagatttcctctgatagaagatattttttacttttccaagattaatagtagaaatattgaacatcaaatcattttacagataatactgtcctaacattgcgtaagtatacaattattcatagactcagaaatcataattgtcttcacagaaagaaaccagttcagaatactttaagaactatttggaatgttagatttaaaatattctgtagccaaggtaaagcaagttagctaaaattccttttgtttctattgtttttagaactagcttcaaagagaaagaatttgataaatacttagtgtccaataggctctttcatacagttcaaagatgtagactgacactggcatctacagttcctagctgtacttactctggtattttttgccagctgccttcgtggtttctgcttcatacctgtttgtattcataaataactcaatctaagatttttagctttttaaaaagaattgcatacaatcatcatcagattacaggtttgaaagaaatcttagtttttttctttttcttttttttgagatggagttttgctgtcgttgcccaggctggagtgcgatggcgcaatatcggctcaccgcaacctccgccttctgggttcaagcgattctcctgcctcagcctcctgagtagctgggattacaggcatgcgtcaccacacctggctaattttgtatttgtagtagagatgaggtttctccatgttggtcaggctggtctcgaactcccgacctcaggtggtcttcccacctcggccgtctaaagtgctgggattacaggcgtgagccactgcgcctagcccagaaatcttagtctttttaactcagttttgagattctgccatatacctggcactgtagttaagagatggcatataaatgggaaaaataggtatttcaaaagcaatcaaaagcaattacaagactatatagtatgtcctaccacgggggtatgcatgggagcagaaggaagaagagacgaattttgcttggctagggttgtattggggttgaaattgatatcaactatagactagaaacttaaagggattttcatgccaacaagagtacaacaggccattcaagtccatctcttccaaacattgattaaacatcttttataggcagacaatcagttagttgctaagaagactaagctgaaaaaggcttttttttttttggccctgttggagctttcagcctattggctgattaaaaaaaaaaaaaaatgctgaggagtatgaagtcacaaaccaattgagttcaggaaccagtaagtagtttgacatgaccgtaatggaggttttgggatatgggcaattggcaaaaaattgaaaaggatgcgggaaaggtggactggggatacaatgtggatggatgattccttgctcaattgagatgaatgtgttcaaaaaaaccaggaagtttttttttatgttttgcatattagaaagttacatttggtggctatatgcagaatcgtgtatggggagagtacaggtgtggaggtcactcatgaggctaatgtctattcaaatgggagaagaggaaggtctgaaaggcaatcactattggaatacatgcaagtacatctagcattgttctgtctttctgaagatgtggaaatgaagctctctcagaattaaatgacaacatgccatggctgtttgttagagggaatggaagtagagattgaaggtcttgatttccagctgatcatcctttttatggtaccataccactcacccagcctgttgaactggaaaagattatgaacatcaggcattaacctaccaaagtaaagcaaaacaaaaacgctgaacttctccatatttttaaaaatatgtgacacatatatgtttattggaaattaaaatacagtaaaggctctttaactgtcattcaataaatattttttgaatgaacgacgatcacttgtcaataactggtattaaaaaagacaaatattaatggtgatctttattcaataatttcataaaatgggaacaaagtggtaatttgccagtaggatgaggagggcatagcagaggttgtctaaccttttggcaagggcaaagtcaaactggtgaataagcaacacaagctgtgatgagagtcatgtgccatatgtaaatggtgactctttcttcctccaatgctgtttatcaccacaggcttcccagcggcccaagaacagtctgccgcagtcactggcattaataaatgccatctctacctgaatgcccttcttttcaaatttttaccaaaaggaagatagtagactttcagttttccttctggctgtgagaggcatagggagaataacggtaacagatgcaggaataaaaaggcttgatacacatggatattatgtcatgagggattcaggagtttatattaatatacaaatattagttgttttttttttgtttgttttttgttttttgttttttttttgagacgtagtcttggtctgtcgcctaggctagagtgcagtggtgctgtctcaactcaatgcaacctccgcctcccgggttcaagcaactctcctgcctcagcctccccagtagctgggattacaggtacctgccactgtgcccggctaatttttgtgtttttaatagagatggggtttctccatctcggtcaggctggtctcgaactcctgacctcgtgatccacctgcctcagcctcccaaagtgttgggcttacaggcatgagccattgcacctggccccaatattacgatttatcctgccctacctcaccactcttttcatgattagagatggaaaaatttgatattatttaaaaatcagtaagattctatctaatcaaaccattggcagtataattcacaacttttttagagattttctaaagtaatacagatactgtagtattgtagttttgtagtatagctacaagaaaatcatactgtgctctgaaatgctatcttagtaacatattgtgttaatggattataatggtaatcaaaacctccatagagctacaggtttgaactctaacattctgtcgaagttaaagattaatcagtttaacaccatattatttttattatttttgagacgtagtctcactctgtcgcccaggctggggtgcagtggagcaatctcggctcactgcaagctccgcctcccaggttcatgccattctcctgccttagcctcccgagtagctgggactacaggcgcccgccactacacccggctaatttttgtctttttattagagagagatggggtttcaccgtgttagccaggatggtcttgatctcctgacctcgtgatccgccctcctcggcctcccaaagtgctgggattacaggcgtgagccaccgcgcccggcccattcctagtattttcaaatagaaatctgatgcctttattactgtaattagaggaatgcttatgtttcaggttgggttttggtaaagcccatgtggagaggagaatttgcatgaaagtagtttaattaaggaaatgttctcagggatggcaagtaggtgagcaagagaagtagaataggaatggggaagaaatcatgcaaggagcaatcgcaggcaaagtgccagcctcagtctggttctgcaggaaaacctgggcctaaactatgcttcagcttgttgcaacttgatacagaaggagctgggcttttgtattccagtagtcaccagtcattgccttaagactaccctaaggtgacataaacaccaaggcacttccggatctctgtttttgttggcaaagcagctttactagcctgaagacagtcatctaaagagatgtagatacagaagttttgagaagcaaagaccacaaaagccaaggaggtgggcacgcagaagtgttaatggaatcttagtggatctggataaaacacgattttttggctataacctctaaagggctaactttcagaagattacgtggacccaattaagcacttacctgaataattttgaaacatctctaattgtactatagctagagttaaaagaaaaaatattttctaatataaacaaaaagttcagaattatagcattattaaagaagcttttttcaaatgttagcattcctgcttcttgactttacatttttccggaacaaaatagttttccaaagagtatacttaatgacttgtgcagatgaattctaaatgataaccacagggctcttggacaagggatcatttaaattttgagttcttgtcagtcagacatatcaatccatatacatttccccaaccagggtgtcagaagtgtagtcaagtgagttttgtaatgatacttctttgtttacatctagctgcagaaacctcttaagactgattctgcatcagaataattgctagagggaaaagggaagctgtgattatgaaataacactgttatccactggcacccctttgtgtctatcttagttgaagctttgaggcacttctgtgtctattatttgattttaattggcaatggtattgattataaatcatttgacagaatataatttttatcttaaagtttaaatgtacctagaggctacaaagattcctgcgttcaatgaaaacattaaagtaatagtgtaagtagtttaaatgtgccccatttggcacagattagtgtcacctatggtacaactcagtcaaaaagtgaatgtagctgaaaactgaaactgttcaacagctccaaatttaagaaacacggaacattcactatgtgcaatagacaatgctagttttagtaggggattaaaaaaaaatatctttcagccaggggctcataaagtagtgaggaaacctacaacaacttcaagtcagataatgacaatatgtcattaagggacatgaacaaatgaccgagagaccgcaagatcaggagggactttttttggagttggttataaaggaatggcaaggcacatgggaatcaagaattcattcaaacagagccttgaagaaaggtgttggtggagtggaaggctagaacacaaaaatacaatctacagaataagaaagcactagggggcaactgtggttggagtacttacaagaacggtttaggaaaataactagttgtactacatagactaaattggataactgtcaagatttgaggattataggtgaagaaaccattttagagtttattataactgacattttgtatctagagacaacagggatatcagtattgatgtaattaaaggatgtggcaagaatgaggtgaaaataacttatgtcttagggctgaaaaattgagaggatggtggtatcattggatatggttagaaatagaaataagcaaaactatgatggggaagtgatttgtatttgggatatattgtctttgatgtattgatgggatatccaataatctccggaaaatatgtctggatctgaggagggaaatcagtgtgtgtttgataggtgtagcagtgagaaagtatcataggcaagataccacaactaaagaaaatggtttgggggtaatcaatatggagtttaagccatgggggcagatgatacggcaaaaggatattatacacagttaaaaaggaacccaaaaccaagtcttggagaattcacatttaaatacgtgcagatatagagaagccagcaaagaagtgttaggagaagtcacaggaaactgtaaagtgtctggtcacagaagcagcaagaaaaacagtttttaaggaggtgactacattgaccaaaggcagtgattgaattgaaatttacttggggtctgagaaaagaccattcggttttctggttgctttgactaattttaaagtaacaatttcagtggagtagtagaccataacctataaatgcattgatgtatttatttattcattcactcactaattcacttatccaatagtcattcatttattcttcggtgcttacaaccgggcctggcactggattaaagtgaaattagaagtagataaactggtagagatagccaaaacatatctccctacagaagggaaaagagcagaaaattatcatggaaacactttgcatagagtttctcacagcaggttgaaagtatcctaaggttatagcagtgtaggctggaggaaaaggagaaaatacagactaggcaggacaggcactggggaaattcaggtgtaactaagaagagactgagtgctgggagacagggtgtaatctgttaaatagaaacataggcaatagtaaatcagggaaccagaaagagttcaagagtcgatgaagagggacatgtatcaaggtctcgatcgagagggctgtgattcaaggcagagcctccattccagagggagcttaggatactcttctggttttctattactatgtaacaaaacaccccaagtacagtggcttaaaataacatctcttttatctttttatctgattttgtgaatcaggaattcagccgtgttcagcttattgatttttctactctgtgtggtgtcagttgacatcacttggcagaattcagctagtggatgtgctggtctggagggttcaagacagattcacttaatgcttaatgccattgtgagaatggctgaaaggctcagttcagcagggactgtcaaccagaggacttgtagatgtcttctacagcatggtggtttcagggtagtcagtttttatgcatggcatcttagggctcccagagtgagtattctaagaaacccataaagaggctaaaagttactaataatgatctaatcttggaagacctataacatcatattcgttgcattctacttggcagacaagttgctaagacaaatccgagctttaaggggagaattagatgctgcctcttgatgaaagaagtgtcaaataattttgtggccatttctagtccatcataactgctgtaaatttcctcctcctaccatggtattgagtgatgcatatctcacaggaggagagtgtgtcagtgactctagctgagaagggcagaagaaagaagatccttgcacaaacaagccaggcgagagagaaaactggcagtttttaggaaagaaaagagatgcatcttggcaggaaacaattgatggtagccagagttcaaggctcatgctgaccgttcattcttctacattttctaagctcaatctttgtatcaatagagaatatcagaaaacttccttggggaatcttactttggctctctgtaaaaatgaacttgtcgcaatgttctaccctcaacaatgggtgaacacagatttaagaaaaagacatgaaaagcttatctgttcttttgtgaaagtgccaaacactttctgttaaggttttcattgttgttaaagtgaaaatttggtatgacagctgctgtgagggatagacttaaggccttgcaactcaaattatggtctgcaatctaggagcaccagttgaggttttgttagaaatgtacattttcaggcgctatcctagacctcacacgagtctgcacttgactaacatcttcagaggtttcatgtgcaaacaaatgttgagaaactctgatctaagggatgtttcattattcagatcattgcaaaggacttgttaggttcctgttcttggtcttgtccctgtggacttcagattgaaaatcttacccttagcttaggctaagataaaattcctttccttttatttgatggcaattatacataacatgtcattacttgatttttattcgactttggagaagcaaagggttttggctaatttttagtaactattcttagcttttacaatgttatcattttatgtttgcattttttcctagccttatttagattctagacacagaataggggactgtgagtgctgagagtatccttagagaataaccactgtaacctacttcattttcatataagaaatgaatgctcagaaatgtgccttgatgtactcatggctacttaatcagtggtaaagctgagcctagaattatttcctcaaaattgtagtcctctgtacacttggatcagaattaacaggcaatgcatgtcataacgggctcatccaggtggttctaatatatactaaagtctgagaaacaggcctgagtgtagcttcaatgtctgctctctcactctaatgcctactgcctgccatatctagatgcctgtgtgtatgtgaacgaggagggaagagaattaaatcctagagatgttggtagccaattatctcaaaagcacatatttaggggtcagcttttaaaaggaggaggggggcttattcccctgacatttgagcaaagcaggaaagggtcggtgatgaaatgccatgtgtcctgaggacctacaggcctgggttatatgaccacttcaggaattgcatagcaatcaaaaagggaactaaaagaatcggaggctgggtaaaatcaggactaacaattgataaagcaattatgatcaacagtgagtgagagaaggagatttacctgatggtgaggtggtagccaccactaagattagtttaaataagattagccaccactaagagttttaaaatgaatgcatgaggcactggagtcttccattgcttctcttgccctccttgatgtcttctgacaggagccatagagatctttataaaacacaaactagatcatatctctcctacccaaagcctgtaaaagcatctctattacatttagtttaacatctctactgtggcttaccccttatccttctttgcccactaacttcatttagcatccacttcccctacttccctttgtgcatcttgtgcctgctatctgtaattcttccctttttataaaatctcctttttaagatcataccttgaattgtatctcttcagaaagggcttcctatagcttagccttaaaattctttttcagttgactttatttctaccttagcatgtaaaatgttgtcatctcttatttgttgttcatcttcttgagacagtaagctccagaaatgcagaaactaaatcattattcaatctaacctcatgtgatatctgtcacattgtagataatacttgaattttaaaaaggggacagaagtttcaagaacagtatactgtggtttaagtgagcaattcactgtgtgtgatccatggggtaggatggttcgaggtaggtgagaaagcatgaactggccatgaacatggacgcaaattgatcaaagtcattgcagcttagcaggtcaaaaagctgtgaggtcagagcatcagttaaaatgttcaatggtagttggtcatgatggcattagcaacctttaaatttaaagggacttaagtcacatccagaaatcggggatgacaagcctatagtcatcctctcttgaagtcttctgctgatacaagtaatcattcagtctgttggtctctatccccatgtcaccaccaacgatgactgggatccagtcaagcccttggatatcatgtcctctctcgtgtccttttcataccaatttaatcatgcctggagtgcccagaagcatactttcagtctcgcctgctttgacacctgactcattcatgccttaacctactgtgctagtgttatgatggggagggagggggtgactgagtggatttgacctcccaaaccatattctagcaagcaaggtacatcttaactctggaattcttctaaacctatatagggtttctgaaacttagtctcagagtgggagtggaatgatacagtactttgtcagaagctcataacaacgactgtgtcttaccataatccattacaatactgttcttgttccagttgaacagctggaagttgaaaaacatttcctttggaatgagtcaaactgtatcttacacaatcttcccagctcttatttacgagatagataatgtcattggtgctcaatatactaaggatttttcaatgcagggctctaatcttatcaatagattccagggaattactgagaaacacattatttgatccttgatgtctctttccttgtatttttatagtagcacgcttgaggaagtacacatatatagcttccaagaatgagggaaggcatcagttaatatgttaaaatagaaacctcccacttgatcttaagtatggggagggcgggggaaggagacaagccttaagcctgtttaccattgcaggtaaacaaacatgaagatcaaattctaagtaaggagagtttgttatggaatagctgagactgagggcataaagacaaccattcaaattattctagggtttcagaagacactgaagaaagaatagggagatgaactgttggtgaagcagagaggaaaaatagaccaagattaagagaaaaaaaacacgggaaaagattgcaggttggaggagggtgggtctatccaaggctgaggtcgaagcttacggcaaggatgcaggggaagaatgttttgttaatggtaaatagattgcaaaaattctgtagtttgcctgttcattctgatgatgggttttgtggttttttttttttttttttttttttttttttgctgtacagaagccttttagttctatctcagttgttaatttttagttttgttgcaattgactgatgtttttgtcaggaaatcaaaatctttgcctgtgcatatatcctgaatggtattgcttagattttcttacagggtttttatagttagtgggttttgtgtttaagtctttaatccatcttgagttaatttttgtataaggtgtaaggaaggtgtccagtttcagttttctgaatatggctagccagtcttcccagcaccatttattaaatagggaatcctttccccattgcttgtttttgtcaggtttgtcaaacatcagttggttgggtattagatgtgtgatcttatttccaagatgttggttctgttccattggtctatgtgtctgtttttctaccagtaccatgatgttttgggtagtatagtctgaagtcaggtagcattaggcttctagctttgttatttttgcttaggattgtcttggctatatgggctcctttttggttctgtatgaattttaaaacagttttctttttttctaattctgtgaataatgtcaatggtagataaatgggaatagcattgaatctataaattatacagtatggccattttcacagtattgattctatccatgagcatggaatgttcttccatttgtttgtgtcctcttagttccttgagcagtggtttgtagctctccttgaagaggtggtgcacttagcctgttagctgtattcctacttactttattctctttgtagccattgtaaatgggagttcatacatgatttggctctctgtctattgttgtaggaatgcttgtgatttttacacattgatttttgtatcctgagactttgctgaatttgcttgccagcttaaggagattttggggtgagacgatggagttttctagatacacagaagagacagtttgacttcctctcttcctatttatccttgatttctttctcttgcctgattgccctggccagaaattccaatacagtgttgaataggaatggtaagagagggcatccttgtcttgtgctggttttcaagggtttgtcataccaaaacctacagccagtttttgcccatctagtatgatattggctgtaggtttgtcataaatagctcttatttagagacatgttccatcaatacctaatctactgaaggtttttaacatgaaaggatgttgaattttatcaagacttttctgcgtctattcattcctttgcattcttttttctctaatcttgtctgctggtgttatttcagcaagataatcttcaagctctgaaattcattcttctgcttggtctatttggttattgatacttgcggtagcattgtgaagttcttgtgttttttcagctcccttgggtcatttatgttactctctagactgataattcttgttaacagctcctgtaatgttttatcatggctcttaacttctttgcattgggttagaccatgctcctttagctcagtaaagttcgttattactcatcttctgaagcctacttctgtcaattcagccgtctcagcctctgtccacttctgtgcccttgctggagaggagttgcaatcacttgcaggagaagaggcactctggctttttgagttttcagtgtttttgttttttgattctcatcttcatgagtttgtctagtttcaatcttggaggctgctgacctttggatggggttttaattgggattttttttgttgatgctgttgttgttgctttctgtttgcttttttaacaggtccctcttctatagggctgctgcagtttgttgggggttcgctccagaccccattcacctgggtcccttctgcacttggaaatgtcacctaaggaggctgcagaacagcaaagatggctgcctgctccttcctctagtatctctgtccctgagggtcactgaccagatgccagcaggaaccttcctgtataaggtgtctagcgactgctgttgggggtgggtctcacccagtcagggtgcacgggatccaggacccacttaaggaagcactctggctgccccttggtcgagggggtttgctgtcctgggggaatcccacttgtctgggcttcccggattctttagagccagcagggtaaagactaagtccgctgatctgcggagaccatggccacccctccccctaggggctcaggtccaggggaatcggagttctttccctaaacccctggctggagttactggaattcctgcaagcaggccctgcccagtgaggagggatgggtcagagtccggcctaatgaggcaatctggccattatttgccatagctggtgtgctgtactgcagggaattcctcctgggttcaaactgtccagtctccctcaaacctgaaggggaaaaatggtggactggagctgcagtgatggctgctgccctccctacaggagctcagtcctctcagtaagccggtagccaccgtgatggctgctgcccctccccacagcagctcagttctcttaggtggcagttctcttagatgccgcccctccccgggagagctcagtcatttgctgtaacaggcagctgcagtgatgatggccgcccccgcccccggaaactgagcagtcttaaggagtcgtctccatccgagtggcctgcgagaatctgcacagctgtgttttgagacccaaggccctgttggcatgggctcgcaagtgggatctcctgatctgcgggttgcacagatctgtggaaaaagaaagatttcccaggcagggtaggacaatcactcactacctcccttggctgggagtgggagcttcccttgtcgcgtttggctcccaggtgggccatggcaccaccctgcttttccttgcgctctcatgccaactgcctagtcagtcccagtgagagaacctggacacctctgttgctggtgcaggattcactcacggttttggttcttctcagtgggagcctctgactgcagctgttcctagttggtcatcttggcctctctccatatttttccatttttgatgtaactttaagtttttgcttaaattcccatattggatattacagtctaaaatcaagagaaggttaatgtggaccgagccattatttaaatttaaggttcaaagaggtaggtcattcagccaggtgagtgagcaccaatcttttaaaaagttggttaactatttgatagtttccacttttcaagctgataatgatattttaaaccaaggtcatttcaatttccttttggttcaatatttttggaaagttgctacctctttgaaataaaaatattttgtacaggattgtttacaattagcaaatgtttgctgataaagatgaatcactgaattaggtaccttttgtagttatgtaataaagctcttggtaaaaacttctatttaagcagttataactaatttttcctattgaaatgtcaggtacctattaagattttctcatagggcaattttaaattttttctttgagctttgtaagaaaaaaattgtcaactctactttcctttggctcttattcaactttattttaaaatgcatttttctagaaacactaactaaaggtgacagttttagttcacagggaactatttttgatttactatttttgttttggaaatgtctgaataaaccactggaaattatagcttataatgaagaaaacaagataaacacactttttatctaaagtgacagtaaaaatctagcaaatgggagaaaaataaagtcaacttttttttttttttaacttctccaattgaacgtcaaatgaacatattgggcaaggaatacaaccttagttgcatttacaatacagtggctacaacagaagagttaaacactaagtcttacgaaaggtagctttagaaatatttgaaagttggccgggtacggtggttcaggcctataatcccagcactttgggaggccgaggtgggcggatcacgaggtcaggagtttgagactggcctggccaatgtggtgaaaccctgtttctactaaaaaaatacaaaaatcagctgggcgtggtggcatgcgcctgtaatcccagctacttggaaggctgaggcaggagaatcgcttgacactgggagacggaggttgcagtgagctgagaccacaccactgcgctgcaggctgggcgaaagagtgaaactctgtccccccccccccacccccccacccccccccaaaaaaaagtgtgtgtatgtatatattaaggttgacactgtatttaaaaaatttctatgaaactgacaaaactattgcttcgttaattcttttttgcaagattgcattggaggaactgcatggaatataatgactgtgttcttttctaatagcacatgagtcagatctctagaaactgacttttgcccatattcaatttcagcagtaaaataatttctagcttgatatttctcataaaaactcctagggctcttttaaaaatattttataaatatctttataatgtggcttaatttttcagacatcttctgtgtagaaacaaatattcatatgtatgtacacatattagctattgctgtgtaataagccaccttgaaactcagtaggttaaaacaaccaacatactatttcaaatacatatgttagccaggaagttcttcaccttactgctaggattactcgtgtgtctctagttagctgggggttggctaaggggctttgctgatctcagctcagctctgcgaaatgtctggctgtctgctagtctgggaaaacttcatctgggacaactagggcaacttgactcggttccacttgtctcatcctcctgctgtctagctctgatgtgctcttacggtaaatgcagaggcatgaacaagagagcaaaagtgttcaagcccttttgaggtctacatttgggagaggaaatgccagcacttcaattgcactctgttggtcaaaatgagtcaaatgccaacccagatttaagaagcagggaaatagataccaacttttcatgagaagaacagcaatgctacattgcaaagggtatggattcaggaaaggatgaaatactaggcccaattttgtagttaacttaccatttacagcagttgctcctggacagtatggcttccttgccaaatatttttgcatgcaaataattggtaaacagtgccaatattggtttttcctaaacaatactatgttaaagtgtcagtcaaaatatgaattaaaaaatgcaaaacatggtaagagcttctcaaaattagttatgtttgaaagggtgaaaagaaaagacaagcagacatttgcctaagcagctttgggtggttaatcaagtcggtacactcggatggggtgtcttgtacctctctagtctcatgttccatccgtccacttacgttccaagaagtggcttatagttccttgaacagtgcgtctatttcatctgatccttagcatgtgaagtttcctctgcttgactttatcttccctttacacttctacctgttgataacctgttcaaccttgtatattctattcagggattttcactctgttgttctctccagtgaagatatcttttatttgtgccagcaccatacttacgacaaaaaaatcactattaataggattataacaccatgctataattatattcgcttaaatgtatatttccttcctaggctattacaaaagctgtgaaaacagtggcagtatgtttttatcttttatcttcccatttttcttaggacagtatgatgcataatactggttacatttagttgaatgactatccccctcgtctgacacataaggaaaataagccaagtgctatgtaatttatcagtgttcacacaactggcaaaatttaaattatagaactgtaataaataaaggcctatttgcttccagatactatattatttaacttacaactacaccgaatctcacatggaagactttcaagtaaggaactggcacttttcagtggatcttaagaaatggctacactaaatgccctagttaaactttttcttctgtttactactacctcatttaatccttatcaacttcaaggattatatttcttatattttgatttatatagccttaagtttttgttgaatgatatttcttctttagttaatataaaaagccacatttttcaaatacattagagtgaattatacattcgaacaatttgcagtgtgctctaaaatagtatttagtaattgagtctgctgagcacactggagtcctgaggagttaatgaaacccccgatgtcaaatgatataacaataggaatttgggactttgaagaattttcctaatgtatatatgtagaattatcactgttactatctttccattacaaatgggacctacaattaggagcaattttattggcaggctatataactgtatctgaccttttggaaatgatagaagaaagaaaagatatattaaactatctttgtagaaaagatgacgtaaaggctcaagtaaaactcacctaacccttgcccctgaatgtgatgatagtcaagcccagcttaaacagcagttgcaaagtaaagaatggtgtagagatctgtagatacactgcctaagtccaaattagtatctagcacttacttgctgtgtgaccttattcaagttacttatattgtgtctgtttcatcagttgtaaaatgggggtgactgtgaacattaaaacaacccacaaaaagtacacagaagtagcgctgacataaaccagtcgatgtgtgtaactcgcatctttctgatacatgaggtagagtcatataaaaattgtaatatttgacaatatttgacttcagaattggaaattgcataaagttggaccactaaaaggaaataaagcatagcagtgacagacgttctcctttaaatattttatcctctgtgacttttgacagaagatcttctttaaatattgtatcctatgtgacatttatcttttctgtgtttccaatttctttgatttggaacttcctgtagacagacccttacaggcatggaagaagaaagaatgaataaaccaaggatgacttcccagtaggtggaggatgggaataattaggaagaagctgtgtcttgtcacctatattgtccatacacaactgcaccgtagggtaattgagaaattataagaatggtaataaatacgttttacattcattaattaaagtcatctttggatgccctttgtccataatgtttcctctactagatctgaagcctaaatatcacttttcttctctgcaatttccctggaactgagtactcatagatgtttgtctagtgagccattccattatgtcatggtatatgtgtgtatttgtgtgtgtgtgtgtgtgtgtgtgtgtgtgtgtgtgtataaacacaatcttttttttttttttttgagacggagtctcactctgccacccaggctggagtgcagtggtgcaatcttggctcactgcaacctctgcctcccagattctctcccaccttagcctcccaagtagctgggacttcaggcgcgtgccaccatgcccagctaacttttgtatttttagtaaaggtggagtttcgccacgttggccaggctggtctcaaactcctggcttcaagtgatctgcccttctcggcctcccaaagtactggggttacaggcatgagccactgcgcctagcctatagatttcttttttgaagaatcagtgttatttgcatgctttgaaacaaagtgcttcatcttgccaaccttgtaccataccgtttctgtcagaaaagcaaccattgggatagattgtaattagccttcatttccatcactggctatctcaaatgcaaatcatgtatctatgtgaatcaaaagaaaaactggatttaggcctggtgcagtggctcatgcctgtaaatctcagcactttgggaggctgaggcaggtggatcacgaggtcaggaggtcgagaccagcctggctaacaaggtgaaaccccgtctctactaaaaatataaaaaaattagccaagcgtagtggctcgcgcctgtaatcccagctactagggacgcggaggcaggagaatcgcttgaacctgggaggcggaggttgcagtgagccaagatcacgccactacactccagccaaggtgacagagtctcaacaacaacaaaaaactgggtttaactttcagaatgttcaattttataggggatatttaaaggtggtgtaattagtataatcatggattgtaatcattccacaaattttaaaataactttgtgaattacattaatacataaaaatataagataaagcatttaccataattttattaatatttcctttagaatacctggtaaaatgaatgagtactgacctaacttaaagataaaacaattgagacctagctttagaagttagttttattacaaaacatgttaaggatagacctgatcagacaatgaatcatgctgactttttgttaagcatacttctgggttcataacatcccacttacatataacaacttgatttccattaacgatggtgtggtttcctatttaaagttcgaatgcacatctgtttgaatcatttctagtgtacttaatagagtaacatacatattgggttctagttaagatgctttataaaatgccaaataacattttatatctggagagattataaaaacttgtattttgtagctttgctcttgaacacttgctagctgcaaggaataacttggctttttcttgatgatcttcatagccagattttcgtgctttttttggtagagagaagtctctacaagtatttgacgctaaggaataatgaataaatacctactgattttatctgctaaggtccacaaaacattccagtattttgatatcactattaaagaagacgacggtgttccagtgatacatatgattccttacaatgacatcaccagagatagaaatatgaggcatgggaagtaacacgtaggccttcatttattttctgatatggacatccctggcattgatctccttggctcaaaggaaatttgcttccatgtctagggtggtgaatgtctttggcttatttctttggccctactctccacttttgtcttccttgggaggctgatgtctgtggactacatcaacaggctcctttgccctctggctactagttggatttggccaatgagagccttggtaagagagggagagaggaaagaaattccatcacccaatatcaaagctcctgtcagataatcttctcttctcagttctctctctatgtagtaactagaaaccactctccttcttttcattcttaggagtctaagagtagtagtgacacttctctattactagttccagtggtttcattataccttccctcatttttataaacagtcccttattaaactcttctcagattaccaaagtcctgctatggccatataaatttcaaaggagagtgtcattctccacctccaggtgataacatttaacaggagggaatgtaatttatttaatgtttttattgagcattttctatgctaggtaccataccagacatcttacatttattaacccttttaattctcatattttgaagttggtcccttctgttactttgaggccaacattacaaggaaagttatagacgatatggattatttggcttagaaagtttggaataaacgtgtgatagctaacacttacagaatatatcttacaaagtgccatactaagttcacttaaatctttgcaatatcaccacaacataggtaatgatacatgctctttctatagatgaaaagagtaaggcacggagaagttacttgcccaagatcacactgcagagctgggagttgaacccaaggcattctgggtgtacagtcaacattcttattcatggcatcataccattcccccgtgttttccaaagcatattttatcagtgtgacttttttctaaattccctctgcataaatctaatgtatttcagtcactagtattctaactcaaaatacaaaaccagcatttttctatctttaggtgactcctttcaagagaaaactaacctatgatgccacaagtcgtcatagtggccattcttgaggggagcttccacatagggggtgtgaggaagctgctagggtgttgatcatattctgtttcttaaatctcgatgctggtaatataaatatgttcggtttgtgacaattcattgagctgtacacttaagacgtgtactttcctctatgtatattattccgcaacagaatactgctttattatacaataccttttccaactcatatttaagaaaacaaaaaaaaaatcaactcggaaagcttcctatttacatgaaaatgggttgccttatttttctgggagctggtcagcagcgttcttcagtaagttttgaatccccagttttgcaattctttgtggtatttgcgatatttttggtgtttccaatgtctagggatttgtaattgcagaagtatcttgactttcttagcgacagttatgtccatggcttgtcctttttgtaatcagaaggtcatgctaaattatccctgtgttctttactttctactgaaacgtattgatccctttggattttcaggttaaaagaccaatacaactctgaagaatcagaaaccacttaaacaccttcacaaatgcatttcctttctcaaatttttttactttgatttgttccactttgatttggttcactttatttatgccacttgtcaacctacctatctgtgtttctttttgaacactgtttgtgcttccgtatttctttatttcatactaaaaaggatttggaaggaatactgtctcgtttttaggtcctttcgtgttgtggtttgggttaacaaagacaatatatatgcagatacattaaactgagtaatatcagatatccactcagttcacttgataagggaaatcttagtcataaaatgaactgaagacagagagctacagggtcgcctggcccaaggaggaattcatgttttgtgtgcttcacaaaatagttctcatacacttgaaaaggaagccattaaaggttgaattttaaagaaaaaatattgttcttaggatataaaatgccacctgcaacaaagacatggtgtatgttgaagatgaaaggggagaacaacaaaagaatacttaaaaatagtcaaaagaacaagaaaagggaggaaaaagcaagtttctaagtgcatcctctgtaccatctgcattcaccagttttagtaattgtatagggaataatgccttcccctattgacttgcactcccacagggatgccaaactaatagaaaacattttacatgtattctgcactttctaatataatatttttatattatcgaaaagactttaacttgtgtgtgtgtgtgtgtgtgtgtgtgtgtgtgtgtgtgtgtgtgtgtgtgagatcttgcttcgtcacaaaggccggagtgcagtggcacgatctcggctcactgcaacctccaccttcctagttctagcgattctcctgcctcagcctctcgagtagttgggatcacaggtgtgtgccaccacgcccagctaattcttgtatttttagtagagacatggtttgaccatgttggccaggctggtctcgaactcctgaccttaagtgagccacctgcctcagcgtcccaaagtgctaggattacaggtgtgagccactgcacctggccgagttaaacgtttttacacctagaatttggtcaaagaaagagatgcagacaaatagtgttaaaatgaaacataaaaatcaatctatatttattgagtgcatacgatttgccaaatctgtataacgttcctatgtgttgcagttgaacctcacgggagtgctctggagtaataatttgagccccattctaatagtgaataaattgtgcctcagaaaggctgtcacttgcccaagataacacagctagtgagtgagtgagagacctgagttcagaagttagctatttctgcttctgaaacttgggttacttttgctatagtatctataattctatagagtaagttgcaggcaggaaaattagaaccatccaagagaaatagtatgttagattttacctggggtattcatactacagggagaataaaactgagcaccgaaaggtctataaagttacaggctaaatgtagcacatttcactaaaaaaaaaaccacatcagaccgtgggaacgggggtgggggagatttttactcaaaagtacttaaaattacttttacataagtccaggtgtgatggctcatgcctgtaatcccagtactttgggaagctgagggaggcggatcacaaggtcaagagatggagacaagcctgaccaacatagtgaaaccccgtctctactaaaaatacaaaactgagctggacgtgatgacacatgcctgtagtcccagctacttgggaggctgaggcaggagaatcacttgaacctgggaggcggaggttgcagtgagccaagattgcgccactgcactccagcctggcaacagagcgagactctgtctcaaaaaataaatgataaataaatagttttacgttgaaacaagcatatattaaaagaagaaggcaaaatctctaggaatttttagcataaagtatatgctttcaaagaaatttaaaacctgcaggcactgtgtaatttatactgccagactccagggtaaattccttcaatttcatttcctggaaggatgctctggtagaatattctgagaagcactctattagagaatatggtgaatatgactaatagaaattggatttcaattgtgatactttaatatatcattgactctgtgagtttcgaaaataatacgatagcaggaactgtttctctatcacctcactgctttctctctctcggtgccccagctaggtgtacatggaatcccctacctgacctataatcctttactccctctccattttggttacctccagttttaaaagaagacttataaaagaccttggtctatgtatttaagtttggcccacaaagcaagattctgtctgcgtttttgacctttgcctagactttgtctccaaacccaaacgtagtccttgtgtcttggatgctatatgatcctgatggctttgggattcatgttttattctgtactccaagacttctctcacctttcccagtctctgctcctctttttgaataaacagcagtttatcacgcacatacttcttggtctgacagacttcaactttctaccctggattttttcttttcataaaaacaagtatctctgtcagttaacagttaactatattttcttcaacaatggacacattgcagtgcataagattattttttgatgagtttaaaagtcatgctttgctcagataagtgtgaaattttgctcctggccaaaggagggaaaaaaacacatcattttaatggcattgtataccttcattcaatttgaaaaacaaattattacactcaaaataccaaattattccaggttagatatgaagttcttggcagcactattagaaagtgtaaatttattttcttattactagagagctttccttaaagtttcattaaaatggcactgttttaagatttatgtgtatattatgtatagtaaagttgctttgttttagattaaatttatggatacatagtatatttagggggtaaatagatatattgatacaggcatgcgaagcataatcatatcagggtaagtgaagtatctgtcacctcaagaatgtatcctttctttgtgccacaaacattccacttcaaatttttttttttttttgagacgcagtcttgctctgtcacccagggtggagtgcagtgatgctatctgggctcattgcaagctccgcctcccgggttcacgccgttctcctgcctcagcctcccaagtagctgggactgcaggtgcccgccaccaagcccacctaattttttgtatttttagtagagacggggtttcactgtgttagccaggatggtctcgatctcctgacctcatgatccgcctgcctcggcctcccaaagtgttgggattacaggcgtgagccaccgtgcctggcccaaattcttaaatgtacagtaaattgttgactgtaatcaccctcttgtgttgccaaatagatcttactcattctaactagatttttgtacccactaaacattcccactcctcctgtccccaactacccatactacactctggtaaacatcattctactctctgtctccatgagttcaattgctttaatttttagttactgcatatgagtgagcccatgcaaagtttgtttttgtgcctggcttatttcacttaatacaatgtattccagttccatccacgttgttgcaaatgacagcgtctcatttttttttatgactgagtagtactccactacgtatatatgtaccacattttctttatccattcatttgttaatggatacttggattgcttccaaatcttggctattgtgaatagggttgcaataaacatgagggtgcagatatttctttgacaaactgatttcctttcttttgggtatatacccggcagtaggattgctggattatatggtagttctgttttcagtttttttgaagaacctcaaacagttcttcacagtggttctactactttacatccccaacaacgatgtaccaaggttcccttttccacacagccgcatcagcattgatgttgcctgtctgttggatataagccattttaactggggtgagatgatacctcattgtagttttgatttacatttctctgatcaatgatagtgacaaccttttcatattcctctttgacatttgtgtcatctcttgagaaatctctattcaaatttttgcccttctttcaatcagatgattatatatatttttttctatggagttgtttgagccccttatagattttggttattccttgtcaggtgggtagttggccagtattctctcctactctgtgtgttgtgtcttcactttgttgattgtattccttgctgtgtagaagctttttaacttgatgtctcatttgtgcatgtttgctttgattgcttgtgcttggtagggtattgctcaagaaatatttgcctagaccagtgtcttggagattttatcccaatgatttcttgtagtagtttcatagtttgaggccttagatttaagtctttgttccacttagattgatacttttgtatatggcgagagataagggtctaatttcattcttttgcatatccatatccagttttctcagcaccatttattgaaaagatggtcttttcttcagtgtatgttcttggcacctttgttaaaaatgagtttactttaggtctgtggagttgtgtctgggctctattctgttccattggtctatgtgtctgtttttatgccattagcatgcatttttggttagtatagctctgtagtataatttgaagtcaggtaatgggattcctagttttgtaaacaaggatcatttgattcttccttttcaatctggatgccctttgtttctttctttgatctagctaggacttgtagtaatatgttaaacaacagtagtgaaagtgggcatccttgttacagatcttagagaaaagtcttgtagtttttccccattcagtatgaaattagctgtgggtttctcatatgtggcttttactgtgttaaggtatgctgcttctatacccagttttgagagtttttatcatgaaggcatgttgaatttttatcaaatgctttttcagcatctattgaaatgatatggtttttgtccttcattctgttcatacgatctatcacattgattttttgcatatggtgacccatcttggcatccctaggacaaataccacttggttataacgaatgacctttttaatgttgtgttgaatttggtttgctagtattttgttgaggatttttgtatcagtatttgtcagagataatagcctgcagttttgttttctggatatctgtctggttttcgtgtcaggctaatattggcctcacagaatgagttcagaagtacttcctcctcctctttttcacaatagtttgagtattaggtgtttcaatgtttggtaacattcagcagtgaagccatcaggtctcgggcttttcttcactgggagactttttacatctttgatctcattacttgttgttggtctgttcgggttttgcatgtcttcatgacacaatctaattttgagtttggtttgctattctagttctttaagatgtattgtttctcttttttttttttttttgatacaagtgcttattgctgtaaactttgctagtactgatttatctgtagcccacaagttttagtatgctgtgtttacagttttgtttcaagaaattttataacttccttatgaatttcttcattgacccactgatcattcaagagaatatagattaattcccttgtgttttgtataattttcaaaattcctcattactgatttctcagttcattcaactgtggtcagataagatactttatatttcaattttttgaatttaaggcttgttttgtggcctaacatatggcccatccttgagaatcctccatgtggtgatgagaggaatgtacactctgcagctgttggttgaaatgttctgtaaatatttattaggtacatttagtctgtagtacagattaagttcaatgtttcctagttgactttttgcctgatgacgtccaaggctgaaagtggggtattgaggtttccagctctctttaggtctaataatgttgctttatatatctgggtgctccagtgttcggtacgtatatatttacaattggtatatcttattgctgaaatgattcctttattatatgttgatctttgtctcttcttacagtttgtcttgaaatatattttgtttgatgtaagaatagctactcctgttcttttttggttgctatcgacatggaatatctttttacatcccttaattttaagtctggctttgtaggtgaagcgtgtttcttgtaggcaacagattgagtcttggtgtttgttgttgttgttgttgtttgtttttttttttttttttctgtcactgtgttttgattggagagtttatttcatttatgttcagttttattattaagaacttattcctaccattttgttttctggttgttttgtggctttctcttccatcctgtcttcctttttagtgaaggcgatttttctctagtggcatgcttttatttcttgctttttaaattttgtgaatcttagtatatcttcttatttgaggctaccatgaggtttacaaacactataacccattatttcaaacagacaacactggttgcataaacaagaaagcaaagagaaaactaattaaaaactcaaacttcgtctcttttaatctttttgttgtttgtttatatctcattatactgtctatgtcttaaagttattagagttatttgttaactgaaagcttcctttttttactcttcttattcaagatatgagtagttcatacatcacaattacagtattacaatagtttgtgtttgtctgtacttactgagttttgtgccttcagatggtttttctggctagttaaggtcctcttctttccagttgataaattctctttagcatttcttgtagaacaggtctggtgttgatgaaatcccacagcttctgtcttggaaggtctttatctttcttgttggaaggagattttcactggatgcactatcctagcataaagggtcttttccttcagcactttaaatatggcatgacatgtcttagcctgtaagttttctgctgagaagcctgttactagttgttgttaagctttttggaatgtatcttttctcttgctgcttttaggatcctgtctttatccttgacttttgatgcttgccatctaggagccaaggcctgaagttgcatctttatgaatctatctggtgctctcttctattgtggcagagctggcacccaagccacaatacaaagtttgtcccattcttcctttcccatttcataagcagaggaatttttccccatggctaccactgcctcaggctcatggtgagtactgcctggctaccactgatgttcactcaaggcccaagagctttttagttaactaggagtaaacgctgcgaggcctgggtctctccgttctgtgcagtgggttctcctcaggccccaggtgagtccagaaatgccatccaggagccaaggcctgcaatcagagaacccaggagcttgcttgatggtctacctgactgtggttgagctagtacccaagctgcaagacaaagtccactctattgcctctcctttccaaaagcacaaggagtatatccccatggccaccacacttgggaatgcattgggccacacccaaagacagcatggctctgagtcttacccaagacttggtgaatactgcctggctactactgctgcttattcaggacccagggactctttagtcagcaggtgacgaattctaccaggactggattcttctcttcaaggtagcaagttcccttctggccctgggtgtatttaagaatgtcactcaggagccagggcctggaatggggggtctcaggactctgcctgatgccttatcctactgtggttgagcttgtgtccaagttgcaagacaatgtcatctttactgtccctatcctctcctcaagtggaagaagcagtctctctcaaagctgtcagctgcactgttaggggttagaggatggggtggtacaagcactggtgtcttactgggttgtgtgcccaccaagtcccctgacttcgagtccagcacgacaccaagacttgcccaggaattgcagtttttgtagcctagactccctttgaagtttatttaggaccccaaagtgcttgagctcacactggtgagactagctggaactcagcttctaactgctgagatgggtgatacctccctggatagggctggtctaaatgtgccctctatgtgcgcttgatgaattctgccctgtgttgcttcccactgtgacagggcagcactgggttccaatgcaacgtttcacaatcctgcgccctccctcctgcaagcacacagatcgtctacatgagacatggcctctgccaggggatgggggaggggtggtgttggcaattcgtaactgtctttcctaccatcttcagtgcctctttccttgatatgatattaaaatcaagtactgtgattgctcacttgatttttggtttttatgtaggtgcttgcttgtgtggctatctgttcagtttggtgtttctatagcagcggtagcgggaaagatgattgctggaaggttccatgtatttgaccgtcttgttctgcctccctcctagtaaagctattctttaaaaattctagcatgttagggttttgtgttatgttctttttcccatggaatttgaaaatggatctatttgagtagaatttcaaaagaataactcataatttttgtctaagtatatatgtggctggattcacaaagctgggcacacagggactggttggttgccgcaggtatcattgttccctgcttgaagtacccgggcatttacaggtcttgtcattgacatggctacctggttgtaggaatagtctaaatcctatgtttttaatcgtggaagtttaagggatgtcttttgcctggaaaccagggattttcttgacttgtgtgaaattcaaagtttatatgtgatccaaggagtgtatgtaaagagcacagtcacccaaaggctaatgttagacccatcacctgacgttttttggaaagtatttgttgatcccaaggcttgtgagagctcccactgttacatgttctttagtcctttctaatgcttctatgtaatagtaccttttaggaatattttctttgctggactctaagttctatagggtctgggcctatgtctgatgtactagcatatgattcagtacctagctcaggtttattcatgctcaatatgtctttgactgattaaattagggatttccagataggtgatgaaaaagctgggaattacctcatgaggggattgtagggttttaagcagaaaacgatttggtgaagtatgacaaaagaaagacaaatgttagaaagataatcaaatagtaggttataaaaggacaaggaagcaacataagattgaaagaacaagaacccagaattagacagatctgagccataattttggctttaccccattctagtttcatgacaaagagccacatactcatcttacatgagatacttagaggttaagtatgttactgctaatctcagaaatgccacaacggttatgaaatccactcatttaatagtgtgtctcatgagtatttacgttaaaaatgttaaatattatttattgactattatttttccttagtataattcctgagcaaagaactgagtaaaatagatgaaaagctctcacagggttgtttcaaacctaattaaacccgatattcctaaaatttgagttatccagtatgagaataggtcatagcatgcaaaatgtgtatgcacagcaagcatgttttgagtgataaggatgtcgaaccactctgactggtatattccaagaatggttaaactttatgtacccacccaggtagattgtggtcttttgcttctttgtgtatttacttttccctttacccgtaactgccttgatcatgcctgtattttttctctccttcatagaatctatattcatttcagtgaattaattagatcatttagggtataaatctcttactcttgctattcaaactaattcaaatagacttgacctatgataaaatttttaaattttttttgtcatttgaactttccttttttcatccgtcatcttcggcagattaattatgcacactaattatccttaaatatagctttagttttcaaaaggggataatcgtgaaaatgtatcattggaagtgtgctttgttaaattgagtgtattttttttaatttcagtttgggaagcagcatattgagaacctcttcagtgacctacaggatgggaggcgcctcctagacctcctcgaaggcctgacagggcaaaaactggtatgtgacttatttttaagaaagttaactttaaacttagtagaatttcagaccagaaactgacaacatagttttatgacatctagtagaatgactaggtactgattgaaacagcaatacctattccttagtaaagcaacctcgtatgattttcatttggcatactctaccgcctgcagaaaaagtaaaaatttcagtaatacaatttatattaatagatattattcagttttactacttggtatctatcttatcaaatatcttaatgaaggcttttatacataatgacttgagaaattatctttgtacttttgtgtatttttgaagttattttacaaggaacctgtatgagtttatacatgtgggatagcaaaataaggtacaggcattatagtgtaatacgtgatagcatatgtgatgaaaatatcacttcctcttgaactattatcttgtctaacttcagagcattcctgtgaagatacatgattgatatacatgattacagatcagtgaagtcatgttgatcaaggtcttacactggggggggaaagaactcaaattgaaatcccctgactgaaataatcgtcttagattgctattctaaaaagtagagtttaagcccccagtctatagtcataaataactgttctacctatcaaattctgctaaatcatagccttcgtctcttatctttgcccttcattacaactccccagcacatgcacatacacacacagacacacacagattttgtcatattatacaaactgaagctgtcgttcaaagtcagttagcaaaaatcctatctaccccagcctgcctcctgtaacacttaacgctaagccactcttttctcggtatatattgtcagatatctctgggtttttgcctgtattattttacttgcctgtatttctttttgtacttctgtctaccccaactgtctgccagaaaccttgatttcacctcagtaaagcttttcccaaattacctttgctaatttttccctcccaaattccacagaaggcccatttttgtcttgtttttagtgtatgtatgactgacatccctcctcaattaaattctgaagtcctatacagaagagacatacctatgctttcattttttatcttcagctatgtgagattaatactaaaacggatccatttttttcaagaagtctgaacttgtactaatagaagaacaacttgatgacatattgaaataataactttagtcaagggggaaaatcagatttaataccttatagctgaactgtttgctgggcgccaatttgaggtcatcatgtaaacttggtcttaatttcactagttagagatagatttgtgtgtaattcatctcctatgactgtgaacaatttacatatatatggatacgtagcatatgtacagaaatcagtgtgtctgtgtatctcgtttctcctgtattctgaagtcagtcctactttgttaccgaatacagaagtcccagtgtcttccaaatgttcgtgaaaaatctttcaaagattatggcttactcatcttgtcctggccctctgttaggaggctgttgtctcttcacttccaggtatctgcgtgatcacttctcctgtgttgcaatcctctggtcatttccctgactgagtcaatccatctatcacccaaagcaatttagtcagggttaacaaatttcatacataatgtttaagataatgaatttcagatcctttcgtaattcataagcatgatttgggtgtttatactcagatatgagataagcctttctctaaacttatgatgttggcacactacccatttgatataaagaaaaaaccactaatttcggcaaaattaaaaaatccacatgatttgcatttatgcatatacatacatagacgctaagacaaaatgaacctaattagtaatagcattaaagaaaaaaatatcaaacaaaatatccatgagattggccagtataaggtaagctagtggtagggaaaaatcaccaaacatttacacatggcagtgtagattacataatttcagatactgctactaacagaatccattcaccattgtttgtcctaatcacagatctgtcagccctggtctgaggattttgcctttctcataaagcagaatcacctctaacaaatgctcccgatcccagaactccaattcgctatgccttgtcttgaattctaatagtttctgtagagatatatcttctactcctaatgggaggcatgtatactatagaacagaaattttagtattctactcagaagcatctgcatttggattattggctcaggacatccccagggttaaaaggaaggtacttgccttacaatcataaaataagaaatactccccaaggagactctaataggggcagattttaagttcccacttcaggatcagaaactgcagctttttaaaagagtagactatgtttggttctaatacatatgcacatgtgtacatttaatgtttgaatatgatacaaaggaaaattttgctaaatcttgtgactatataattacataattgaaaggaaatatgtggctttggtctaactactaggcagagaactgatttgagtaattattttcaaaactttaaagtcctataattaccattaaacttgtatactgtcaatctatatatacacaagaagattggttatttgctgtttttctttcatgtattttttttttattttgatggaatcttactctgtcgcccaggctggagtcagcgacatgatcttggctcactgcaacctctgcctcctgggttcaagcaattttcctgcctcggcctcccaagtagctgagactacaggcatgttccatcatgcctggctaagttttgtatttttagtagacatggggtttcaccatgttggccaggctggtcttgagctcctgatctcaatgagccacctgcctcagcctccccaaatgtctggctgttgcttttttttttttttttttttttttaaatctaaagtcttatttttttcctctttttggtggaaagtgggagaaatatcagaatgtaaaccaacatcattctgacattcttggaggaaaatctaagaggtaaaaatggagattctggttcataaggttagccttaatgttttgtgaaatcaaaggaacaagatgtcaatactgtgttataaaggatatcaggcaagttaccttggagagtaagatggctttagcttaatttgggttgttcagcaggcagtgcaaatgataaggagttctagggtgaggaactacttgagaaagaccaggagctttgctggaaagtataggagttaaatgcaagacacagaaatatagatatttgtttggtgcatgcacaaggtagttagagaagaaggaaataaatttgcaagactggggctctacagacacagacaaaagtttgggtcctggctccaccaattattagttatatggtaatctatatattagatattttaacctgaggttcacttctgtacaatagggatgaaactaactgccttgcaaggcggggattaaaggtagtgcattcaaagtacttggcacatactacgaagtcaataatatttatgttggaccaactatgtgacaagcaccaatcttagtgctttatgcatatcgacacactgaattctgccagaaaccatatgtacaatggtttgagcaatatgaacaataagtagtgccctggacaaggtctggatcctgtgagacagcatgcttcatgtttgagtgagggctttgacctcaaatgcagagaagaaagtatgtcgaattctcttgtaaatcagagcagttgttattgagagcacatgttgtaacttgtgtatgcctcttgctaatattttcattaagtccatttttaacagatgagaaaactggtatacagggagattaaattttttatgtaggccagacagcacaaaaacagcagagctgacaattgaacccaggcagtcagctttgtagctcttgcccttaactgttacctataatcacccaaatgtttaggtgagaactttgcaagtggtttgcattggcagtgggcttacttcaggaacgtcattgttgatggtatgaaggaaggatgaaaaaaatggtgagtgagtggagaagggaaagaggttagatttctctgggcaatagctaataagggcttgtagtaaggtaaaagaaatgaaaatgagagtaaataaaacaggttatcataatggtagaatttctaaaactctacaacttaataaatgagttaatttgtatattacaatgaactatgcagatgttggtttaaaaattacaggataagatacaacttttgggattgagaataaaattagggaaccaaagtgattgaggtttagagcttcagtgacaaggacaattaaggtaatcttcacagaaaaggtttcctttaaccctatttggcattatataattttgctagagtcaaatctcctttagatttttctaaaaagtttgggaattgtttttctatcttactagaaaatgtttttatgcatgctgatgtttctgtcattggtggtcatgcagtaatccccaactgggctatagaatgaagaaacaatcataccaaaataggctttgtaaagaaaaagtgttgccattcttagagtggttggtttatgctaaaaacgtaccaggccaaggacaattagcgcaaagtatttagattcattatattaatgcctcacaggctctgttcgtttacaatattcaagcttaatagtgaaattataaatggtttcatttctagtagattgtcggtctctctgctggtcagtgaacactcttttgttttgttctcagccaaaagaaaaaggatccacaagagttcatgccctgaacaatgtcaacaaggcactgcgggttttgcagaacaataatgtaagtagtaccctggacaaggtctggatgctgtgacacagcatgcttcatgtttgagtgagggctttggccccaaatgcagagaaagtatttcaaattctcttgtaaatcagaccagttcttactgagagcacatgttgtaattcgtgtatgcctgattgtggctaatataattcaggaagcaaatgcatgctgccacagagggaagggaaaagacatagacctgacctgataggctgctccctgttttcagattttacttcatgaagctgtgtttggtggacaaagtcctgcagtcaactcggtttcttttcttactttgcttttctttttcttttttcttttcttttcttttcttttctttttttttttttttgagatggagtctcgctcttctgtcccaggctggagtgcagtggcgtgatctcggctcactgcaaactctgccttccaggtttaagctattctcctgtctcagcctcccgagtagctgggattacaggcacatgccactatggccagctaatttttgtatttttagtagagacagggtttcaccatgttggccaaggctagtctcgaactcctgacctcaggtgatccacctgcctcagcctcccgaagtgctgagattacaggcgtgagccaccgtgcccggtgaactctgtttcttacggcagtgttttgtgcaacaaacggatttttctataccaaatatttatgtactaaatgtgttcaaacctgataatgatgtttgtttaaatcaagccaacacttattaaacgctgtctccaagcatataaattatacagaaacatcactatttttacttggggtatgaatggcagatttgtttttttggtttagatttaactggattaaaatacgtgtgttgcattagaagaagtaaacagtcacagctaaaccaagtaggcaggtcagaggaattctaatctcctctgaaccacttggtgactcttcccctgtgtcatggcattggaggcagccttcctttcttattaacatcctaaaatctgtctaatcgaccaatacatttcaccaggcacttagtagctccctaattacattacctctctctttcaaagataaactcaagtacattgagtacgttgatcacttactcttaaaataaccataagcagggatagattaataataacatgtactcccccaaatgttgctcagcttatctggcagggagatgacattacataagatatggaaatggaaactgtgcagcaattaattggctgattttatgaattcagggtcattgtcacctttaacctatgaaagttattttacagagatgtttgtcttaggaagaaattaactagatttttcactccgcagccagaataatctatgagctgattttcttgtttattagtccgatggactctttggaaatatcagtgtcattgacattatgagaattgttaacaatattaaagttacacaaagaaaatgtctttgaaatatcaaaatatcatattctgtttcaaaatgtagcagtgaagaaaagagcggaacacagaattattagatttaatttatttgtagcttgactgtccccagcaagaaaatgtcatttaaaaaaacaaactttgggatatcctgtaaaactcaatcctgcataaagaaaatgcggtacaggtcgggcgcggtgctcatgcctgtaatcccagcactgtgggaggccgaggctggcagatcaccagaggtcaggagttcgagaccagcctggccaccatggcgaaaccccgtctctactaaaaaatacaaaaattagctgagtatgctggtgcatgcctgtaatcccagctactcgggaggctgaggtaggagaattgcttgaacccagaggctgaggttgcagtgagtggagatcgtgccactgcactccagcctgggaggcagagcgagattccatatcaaaaaaaaaaataataataatttggtacatatacagcatgaaatacaatactatgcagccacagaaaagaattagatcatgtcctttgcagcaacatggatgagtctggaggtcattatcctaagtaaactaacacagaaacagaaaaccgaataacacatattctcaataagtacgagctaaacactgaatgcacacgaacacaagggaacaaagagccagcagcagctagtgctggggaactttgagactcctacgtgataaatcatgaaagggtgtatggggggggtcttacttgcaagtatgttttgggaggttttttgggcacacatgctctggttgtacatgctagcacacataccacatctcattggcatctaaaatctccacccaggggtgtgtgggtttttttgtttgtttgtttgtttacactattacaatgagcaaaagaatagggcaagtttttggaggagtgtgtgcatgcttgtcagtggggaaaatccctagcgtggttatctctggcgagggcctgagaagtcccctttggggctagaggagcccaaccacaaggctagacataatcagtgtggacagtgtgtgtattcattgtccgtttcgctgattgtcaacaggcagcactgactcagtgaaacagcatcttcaggacttcttttctcaatggggctcccttgcctgctcatttctggctatctgcctactccaagggaaccagaaaaatcctggcaataaaacatatagaaggaaatttatatgactttgggataggcaagtatttatgatacctgaatccaaagcatgtttcaaaaagagaaaagttaacttggacttcatcaaaattgagttattgctatattctggatatgagccctttgttttgagttgcaaatgtattttccttttctgtggattacctttttactcacttcaatggttaatattaataaaaacaagttctccacttggatatagtttattctttaaaactttatatttttatgacctgttgaagaaatactggcctacccaaagccattatgatactatattaggttattatctatagaaccattatcgttttaccattttgtttttggatctgttttacctgaaattgattattgcatatggtgtgaggaataggttaagactcagtatttattttatttgaagtctaattaacacaccatttattaaaaataatgcttcctcattgcttcacagtactaagtgtgtcattaaaaatttgtccgtacatatgtgggtctgtttttgcacttcaattctcttgcattgttctctctctctctacacacacaaatatcatgtaatgtggagtaatgtagttttataatacagcctagtatctggtgaactaggttctcccactttgttcgagattttattggttattggccctttctatttttgtatttgttttgtaatcttttccatttacatgtacattcattttaagtatgattaacattgagttaaatctatagagaataactgacacatttacatatggagtatcccagtcttctgtttttcttgattttttttttaaattttaggttttctagaatgagaaactgaaattgaacaggaacacaaaaggtgttcacaaattcaagaatcatatttaagaaatgtttaacctcagcagtaacttgaggaaatttaaattagagctgtaatgagataccagtacaaaattaccaaaatgactgaactagactactaatgccaaatgttgatgaggacatggatcaactggaaatctcacaattaacttctggaaatataattcaggcaactaattaaagagttgggcatgatctactaaatgtgaaaatgcacatttcttaccacccagcaattctattgtagacatacaagttacagaaatacatttcccagtttgccaaaaacacatatatatgtgagaatgttcatagcagtttcatttgtgatagcccaaactggaagtgactatgatacattctcatgatgggatattacagagcaatgaaaatgaccaaatgatagctacacacaatatacaagatgaagtcgttaaaatgtatttgagtgaaataaatcagacaaattatacctactatgatttctttcaattaaatttcaaaaacgggcaaaatgtttccatgggtttaaaattgaagagagtggttaacttttggaaggagtaagtcagtaaaacgcataagagaatcttctgcggtgctcactgttccatgttttgacctgatagctgttacacatgtgtatttactgtaagaaaacgcatcaagttgtacacttatgtatatttttctatatgcatattccacttcaattaaaagaggaacttatgaagggaacttaaaacctccgaaactccacgggccatatatagaaatctgatcatagaccccatgttttctaatgaaattattaaatgaatataagtgaatataaaattagaatatgatgtcatatgaatctcttcagggaaggccacatttcttacagaaaatatagaacctcctaatgttttagtagggaaaaggccccaaaataatggcttaaatttgagaaggagttgttcaaaagcagatattaacaatgctttcatctgagctagagctttaatggggagctgcataagatgctggcctatgcgttagaggacaaaacctcaagacattctcatgcagaaaccaaacttggaacaaaggaacctttaccttagcctgtggctgaacaataacacatggattttcaaaagtaaatctaggctgggcgcggtggctcatgcctgtaataccagcactttgggtggtccaggcgggtggatcatgatgtcaagaaattgagaccatcctggccaacatggtgaaaccccatctctactaaaaacacaaaaattagctgagcgtggtggtgtgcatctgtagtcccagctactcatgaggctgaggcaggagaatcacgtgaacctgggagcagaggttgcagtgagtggagatcgtgccactgcactccagcctggccacagagtgaaaaaaaaaaaatgcattatcttataattctccattttgtcataagtataaacaaaaatggaaaacatccataagtacaactttagtttgcttattaggaagaataaatcaaaatgctcaagcaggattttttttctaaagttgagcttgggtgtgttctatatcaataagcctgtgcaggatataaataatcacattgaagaagtcctatccaaatttccttttaaaattcacaggtatataagttgattgattggtgtcagagcaaacacaaccctttgtgtgtcagagattacagccacatggtaggcaatatgaagcatatatacttaggaacagttaagtgaataaaaaagagatacatagaataagaggtctgagaagaccttttggttcagttcctatatgagcagagacctggagaaagggagtgagccttggaattgtctataggaaggtgggttaggcacggtaataaagaccttaaggtgaaaaagcatttggaatgaggcctcagcaagtggagtagagtgagtttagagataaaggaaacatagcagagataggggagcagagaggtagtaaggtgggggtgagaagaagaaagcatggtgagccattgttggcatttggactcaggtctaaatgagatgacaatgactaaaaaaacactactagaaattaaatgggtcataagtcaggttattttaaaaatcagtaatagttccaagtctttgctattgtgaatagtgccacaatgaacagatgtgtgcatgtgtcttcatagtagaatgatttataatcctttggatatatacccagtaacaggattgctgggtcaaatggtatttctagttccagatccttgaggaatcaccacactgtcttccacaatggttgaactaatttacattcccaccaacagtgtaaaagcattcctatttctccatattctctccagcatcttttgctgactttttaatgattgccattctaactgttgttaaatggtatctcattgtggttttgatttgcatttttctaatgacaagtgataagcattttttcgtatgtatgttggccaaatgtccatcagtgatagactggattaagaaaatgtggtacatatacaccatggaatactatgcagccataaaaaaagaatgagttcatgtcctttgcagggacatggatgaagctggaaaccatcattctcagcaaactaacacaagaacagaaaaccaaacaccgcatgttctgactcataagtggtagctgaacaatgagaacatatggacattaggaggggaacgtcacacaccatggcctgtcagagggtggggggctaggggagggatagaattaggagaaatacctaatgtaggtgacgggtctatgggtacagcaaaccactatcgcaggtgtataactatgtaacaaacctgcacatgtaccccagaacttaaagaataataaaaaatataaaacaggaaaaatcagacaaaatgaaaaatcagtgatagaatactaacaaacttagagtgtcattttattcaagaaagttacagtcaataacgaaaacgtatcgcacagtagaaatgctgctaaatccatgaagaaaaattgatggaaatatatttttagagccattaattcaccactgtcaagtttatgacatatttaacagcaaaagattgagagtacaaataactgtaggtttaatagtgattttctgtatctcaacactaaagcatagtagatacttctataaaatatgagcattatcaataaatctccctatgaagttggatgtgcaagaagagcaatagtttaaaaatttcagttacattaactaaattcaagtctgaactctcaacaaggcattcagaaaatcgtatgtctgtcattattgggaatgctctcccctgagcctatggaatggccagagctcagtagatccacatggtgtctttcatagggcaaaagcattttcattttcagttcattgaggcaaccaagtgatacattcactatacaattttaaggtatcttgtgaagtcaagtgtattaactgtcctgatattaaacacgtggcatacagaaaaagttgaagagagtgtaatcaggggaatatttatagaaacgtggggaggattaaaggaagaaactatggtgaagaatgcagggattcacatgagttaataacctttactacatctaaacctaagcagtcaaggggagagggctattaatttgataaaatccctcatgttgggagagcgccactggacacaactgtgaactgagcccctaggtatctaaagaatgctgttagtttcaaatcattgcctggtgaagttgagagaagtgataccttagtctctccatagaatcctccagtgttttgccagtgccgctccttagtttagtctaaccagaagtccaaggttaagagattccaggtgatgtagtcatcacatacaaagaagaggtgaagaagtttggtgggttagtgaagtaggagtggaaaacggtataatcggcattccaggtatctagttctgttttgtttctgtgcgaaatgaggacttgagaatctgcatgccgagaactctgatgttggctagggcccagtcttgttggatgcatcaggaagccagtcacctttgaggccataccacttctatttgatgacagagagtagacgtggtttctggctaatttggggactaaggactccttcctattcttctggagacaaccagagccagaaaagaaagacacgctgagagtcacttcggatatctgctcttcgtcgtaaacttgttaaaggcttaggaaaatagtaaaaaaaatttcctgccacatacacaaattataaacgggcaatatatttgaatgcagtgaaaatgtcattaaatacacacaaactttcaaaattcatgttatttaataacagtagaaactaataatatacttataaattaagtttgattaaggtttgttaaaccaagagtataaaactacatttgtgaaggaaaaagcattccatatgaaaacccatgagaaatggctcaggctgtactgagagtttgaatttttgtctttgattttgatcttcattaaaaagataaattgaatcaagctttcaaataaaaatgttacaaaaatgctttaaggaaagcaggaactaaagataaagaaatagaagaaacactagataaaatatacagctagttccttataatatgaaatagattaatatcttatgaatgtgatccagacaaggagggagaaaaacaaatgtatgcagtttaaaaatggaagggaaatattaagtatgagatatagaaaccaaaaacgggttttacacagaaatacatatatgtttattataaaaaatgaagttgaggccgagcgtggtggctcacacctgtaatcccagcactttgggaggctggggcgggcagatcacctgaggtcaggagttcgagaccatcctggccaacatggcaaaaccccgtctctactaaaaaaaaaaaaattagacgggtgtggtggctggcgcctgtaattccagctactggggaggctgaggcatgagaatcacttgaacccatgaggcggaggttgcactgagaggtgatcataccactgcactctagtctgggggatcgagcaagacttgtctccaaaaaaaaaaatttttttttgaataccagtgataagtttgtccacacaccaagaaattgataattgctaatagaaaatcatatgaacagcctcctaattctataaacctatgaaaagaaaccctggtttaaaaaaatcactcaaaatttagccctctgatttttaaaggaatattagaagtgtcttttcaaaatgatactttttggtaatttctggatcattaagtcaaggtcattttgtcttctctcttttccttagggtctcctccattttagcctgtccctctgccataaatcactagttctagcatattctgtagttctaaactagctcctcagtttaaccctgttcctcagtttctttcctttccctgtcctggcgtttaacctgttatcctcacttgaatgccactcagcttatatctgtagagctcagacactacgtctgtgttccaatttgcattctttgtggtggctgttttagcatgaagttatccctgctgtcaataatgtattttggaaagccacttattgagaagaaagtacttctaagtgcagtgataactttattgcggtatttgctgagagcaaagctcatttgtaatagttggttgtgattttaaaaagcgaacaaaatacaaaatcctgagaaatgggagactatgctactaagtggttattcttgtctctacatcagctctaggtaaaaatgtatccacagcttctttttatttacaagtttttgaaggtaaagcaaatcccagctaggatgaaacatctcttatacagccattctattatttctttgccctgtcccacttttgtttgtaagtagtgcctttcattaggcattttaaattcagttctacacttaactctattctctcaaagatatttaatgggtaatttaaactttccttggatataactaagttctaatcagtgagtattctctattagatatttgcacttttaataattttgtgtctagtttaatgattaattttttgtctggtaaaggaacttagaaattacaaatttgatagagatttaactgtggtgctttaaactaccccccgctccccaagatgtattatgatctgtcttcctttctccaagcttgtgtcctcgtcttccctcttatgatttccttgcttacattttatgaattccgatcccttttataaagattcatacaaaaggtatagtgttgaaatataccctaggaacattaccaagacttcgctgacttaatataatttaatattaactgacacagttgtagatctaataattatgttcattgtaccagctcatcaattgtctatcacaaggtggtaagtttttaccaagtaacttcaaatctacaatgtgggatactacaaagcaaatagtcattgctatacattaaatcacaaatccaaggtgagtatttaaaaagcctagggtggaaattcagatgacagctatgttcaaatattcacttaaccccatcattgaaaatagtcactgaattagattgaatggttgtcagatgtcactgatctgaaaaatgatatactgttcacatgctggcatataatgttagataaagaggattctaaaatgttctttaaaactagtattttatgtgtcctttaagtattcagaaacttaaatagccatataatacatattttggagcatgtcagaatatatttgactataaactacttctatttattactcataaaatctagtatttaagtacaaattccaaatttaatttgttagacaagtatttcttacacaaaattgtcagtccacacaataggcctgtaaaatatttgcactttatatgtattaattctcaagtttgcagaagaggtagatcttgttaactctgtaacttatcaactatagggtctttgccaaatgattccgtgactttgactcactttatcatctgcgaaatgcattaatagtaaatgttcacttctttcaaaatacttgttatggaagatacaaatatacaaacataatctcgtattcattaaactcacattcagttgcaaggtaatataactactcttaaattgcagcatgttctcatttaaaataattttctgggtgagttgtttattcttcccatcccccttagtatacctcttgctttaagggaaattagtattgacacatttcttgtatattcaacttcaaattgagatagccagttacctattatgttcacatatggaggtctgctgggataataattatataactataaatagtactgtttaaaaatatttcttataatgtcactcaagtatcttttaagatttttattgtagctattgcttttttttttttttttttacttgaaattagtatacgtgacttgagcttaaaaagttggggctatatgggttgatttttgtcgttaaagttacatcctatattgccagataaaagatacgtaattacaaaaattcaaattaaataatatactgaaagtatatatatctttcatactaaattgtgaaagtattgaggacagtgtccatttactcaggcaatgccctctaatatatattctatataaggaattttgttgagtttagttaaaagagctactttcccaaaaagtttagtttgcattttattaatacgttcaaccagattacctgtatcaaaacttctattttgataaatttgttttaatgtctttcatgccattaaatgttcatattttcttaggattatgagacacttgtattaactgcctcaattctttattgtcaaagaggcagtatataaacaaatgaaaacatgactccattaaaaataattctcctgcaatgtatcagagtgatcataaacatatctgaaatatagaggaaatttaacatttcacttgtccataagcaatttgttgaaagtctattttttaaatttattcttaacattctatgcgtggcatatagtgagtggtcaaaaatagttaaagaatgactaaatatgtaaaacttaatcattgaaggtagagatagtatctttgtagtgagtacccagaattaaatcttgtaatatagttgaggtcaaaatgtgcttcaaaaattatctaatgtaaatttctatatctgaatcaaaaataattcttgaaatacggagataaggaagggaataaaaagctgtcattggaaatccaggtccacagtggcaatatggcccaccgtttaggttgtatatatcgacgtatttatgatttaataagaaaaagattcaatacatgcatctctcaatggaagaaaataggtatgatttatgcccataagtcttgaaattttaaacagtgtaaatcttaaatgtggtgtaaaagcacatgctgcagggcaatgaaactactttgcctttcctgtattttttatctttttaaaatgcattatatttagaaggattgtatgaatacttgagaagtttctcttgaatatggagaagtctttagcttggctacatgatggcagacatcttataaaagacatttaacatgtttaaaaagcaaattctgtttatctagaatgttggaaggaacttctcggtttatatatattttatgagaacgaaatgaaatgaaaagaaatgaaagaaccaaatagatggtggaagtacatgcttgaggtttcagtgtcaggaaggatatttacataataattttcaatgcatgggatttcccttttagttattgtttaagattctgtttaaggaaatcaactcaaacttttaaggatatttcagggttcctttcagaatctttttgtgaaattattttataatagtttgtaccatttcatatctagttaaaatcaccaagactgagtgaaaaggtagcttacccttatccccctcccttagctaattttaaaaatgcttgtattttacactgcatatgagggaacaaaagtgactccttcttaggacaaatatcaaactctgaaatgatctgggagaaccaattcctttgaaacaaatgtgagaaacgacctgctttagtctaatttcaattggctgaatgacgcaggacgtgttttcattagagcctgtagctctgaaatgtccttgtcactggttgtctaaaaaggcaagaagaggcagacaccatatattataaagatgatggttcccctgtgaatgagatataactttctgcaacttccaagttaaaaccgcaaatgcttaaatgatacacaaaactctaaacatccatctctctctgcatctaacaaaaataaaattgtatgaaaaaattcattaaagctttgtcagaactttgtcacctgtctttttctctctctcatacacaaaccacacatcacacacacacacacacacacacacacacacacacacacacacacacacgtaaatatcttacaggaatgtaactcttagttttattcatcattttcccttctctctctccttctgctctgccctaagaacttccattttcattatttgacttggttattgaaattattttcaagttacatgcccctcattctgacgtcttatttactattttctgtttgatgaaccctagtctgctattcttctttctgtaaagcaaatcaaaaataacactaacttgttcctgtcaataatctttcagaaaaccatcatatttcaggtttactttcatcttaagtttttcttaagtattcttaaatcttgaatatatcaatataataagtataaatccttttactgtaaaccatcatgggatatctaatcttagcttgaataaaatattgacgatggtagaaattacatccatgttcctgaaggaaagtgggataaaagaaaacagcgaggttttttgcctgtctcgaacaagcaaatgacgagaattgttcctcatagcccagtcatttaggaggtagagtacctggaagtaaatgctccctgaaatgattatatattaatcttagaattactaaatatatattgttatacaaaattatgtattgtaagtactagtctggcgatagaagagggacccccttaagttcttgtcctatgcctttaaaatagacagcaggagactactccatactaaagaataatttaatgtattaggttttctatgtgcaattcttacagactgcttattgtaacttgaggtgtttctaaagagttcacattttaatattctactggagtcacaataagtttccattatgtcaaagcaaaccatggaggttttctatcctccaaaattacatttgaataaagcaacttccgaagataacagtgtaaaactctgagacagcatcccatgttactttatgagtaaaatcttaggcctgttgacaggaactacaaaagccaattgtgctgcgtagtttaacttatttctgcaaaaactcaaggcatgttattacattttcacacagaatatcaattttcacacctattttggtatcagatgttttcattgtgcaaaacaggaaagcagaactttgggtaaccacagtgaccctactatttaatttccaaccatagagtgcttgtcacaacactgatacacacagtaggctcgtacattaacatacatgtcatattaatgttttctgttttgcttagtagacagatgtaatcattcacttcacacagattttaaaaggttttaatatttttaccattcagttatttagcaattagactgataattcttgaaagacataattctggaatgtgtattagaaaaaaaaacataaaagagaagttactgtatggcagggtgatgattatttaagaggaaatagtactgaattcagaaaaatgttatgacttacagctaatagtaagaaatacagcattataagagcaacaagcttatgagaattcatggccaaaacagaccagaccgtcaatgtgaggcattgaagagtaatataaatgccatgaacaataccctttcaggcatgacaaatacctccctcctctagagtcttcatggttatcaattagcatttcttacactccttggtagtttgaagaagacatgtacaagagacaaaacacaaccaaaataaataataatccttgtctgtatcatggtgtgaaatgtttattaacttggagagagagcctcttaaagctttttgtggagaattcactagatgtaattaatgaaatatcttctatccagacatagttttaaatcagaccttgtggaagcttcatttatctttgatactctgtttccctcttggtaaaatgcacataaatgtaaaatgttcatgaactcttggtaaaatttatatagctcatacatactctaatgatgtaggcatagtgaaatctgtattcagagagaactgtatagccataagatttttaaaagatggaaataaaagaagtatgcatcttaagaaattgtaaaaatagaaacaaaaataaaaattgtattcaacgtagaaaattgaataagaataatccattcaaaagtgagctcttgaaaagattaacaaaataggtaaacctatcccagtcataacaaagaaaacttagaataaaaactagacgagataaatgagaaaagacgcatgacagcagatacagaagaaatgaagtggaaactaaaagcaattttataacaattttgcaaaattctggaaaacttgattttctcgtacaatacaaatcactaaaattgagataagaataagtggaaaattagactgattacttcagaaaacatttagtaggttattaaaggtgtactgttgaagagtgtagtaggattctttacaaatgaatttaacgtaacccttaaagaataatttatatactttaagctattccaaagcatatgaaaagaaaaaaactccacaattccttttgtgatgtcaggttaacctttgtacttaacagtcaaaaagcaaagatcataaatctgtaagacagttttacttttgaatgaaatacaaaattttgttgaattataagaaatataatcacattttgcaagtggtaagcattctacaaatgttatctcttatttaccaagagctcttaaaattcaagaaggaaaagaaaactaccatatagaaattaatgagcaaaacatattaacagacaattcacacatggaattgtaataggtcagtgatacaaaaatatattcaaatgcacaaggaatcatggaaataaaagttaacaaagtgatgtatttgatcatacaaacaaaactaaaagaatcaaaaacaaaacaaaaatttcctggtgagagaagagcctattcttatacattctggttaaaatatgtaattctaaattgtttctaggaaggcaggtggaaacacctactaaaattacatatatatgtgtatatatgtgtgtgtatgtatatatgtatatagatgtatacatatgtatatatgtgtatagatgtatacatatgtatatatgtgtatagatgtatagatatatatgtgtatatgtgtagatacacatatacttgtatagatatgtctatatctccctgaaatgatgcgtatatatatatgtatagatgtatctactagagcagagtgtgtgtgtgtgtgtgtgtgtatacacacactctgatccagtatatacatcctgtgaattgttataataacagtagaagcatcagtatctgaaaatgtatgcataagatattggccaggtgtggtgactgctggtgggaatgttaatcaattctgccattgtggaaagcagtgtggtgattcctcaaagaagttaaaacagaaataccattcaacccagcaacctcattatttggtatatacccaaaggaatataaattgttctacgataaagacacatgcacatatatgtttattgcagcactattcacagtagcaaagatggggaatcaacataaatgtccatcaacagtagactgattaagaaaatatgctacatatacaccatggaatacaacccagacaaaaataagattgtagcaacatggatgcagctggagccgttatccttagcaaactagtgcatgaacagaaaaccaaatatcacatgttctcacttataagtgggagttaggctgggcgcagtggcttatacctgtaacctagtactttgggaggccgaggcgagcgggatcacctgaggtcgggagttcgagaccagcctgaccaacatggagaaaccccgtctctactaaaaatacaaaattagccaggcgtggtggcgcatgcctgtaatcccagctacttgggaggctgaggcaggagaatcgcttgaaactcgggaggcggaggttgtggtgagccgagatcgtgccactgcactccagtctgggcaacaagagcgaaactccacctcaaaaaaaaaaaaaaaaaggggagttaataacaagaacacatggatataaagtggggaacaacagacactggagcctactcaagagtaaaaggtgggaggagggagaggatcagaaaaactacctatcaggcaccatacttattacctgggcgatgaaataatgtgtacattaaacccccatgacacgcaatttacctatgtaacaaacctgcacatgtactcctgaacctaatataaaagttaaaaaagagtagctgtctgccactgaatacaattctgtccctgaatataatatctccaattcccaatcagttaattaccccctagtgatctgaatgctttctggcatgctttctccacctgatacttttcttcattccaatctattttttctttacagatttaatcaatactgagtacatgaatatatcttatgtcttttgcttatcttttcacaatgttacttcctttttcttaccccttgggcttccgtgagacacagttgcctacctaattgtttttcctgtggatatagataaattttattggaaaaaaaccatgaacatttatttaggtattatctgtggctgctgctgtgtgtgtgtgtgtgtggggggggggtgcgatgtgtgttccaatgacttattttttattgtggtaaaatacaaatgatgtaaaatttaccatataactattttttattttttaattagcaaaaaaaattgtatataccatgtagcatatgattttttaaaatatctagatgttgtggaatgcttcaagctaataaacatatacattaacttatatgtttatcatttggggttgaggacacttaaaatctattctcttagcaattttcaaaatacaatattgttattaaccaaagtcagcatgttgtacagtagatctcttgaatttattcctattaaatgtaatttagtatcatttgaccaacatctgcctaaccctcctcctccaagctctatcccctgctaaccaacattttactctcaattctatgagctcaacattttaaaatttcatatacaagtgacatgatgtaatgtttgtctttctgtgcctggcttatgtcatttgacgtaacgtactctagattcattaatttcattgcaaatgagaggattctctgctttttaagtccgagtagtattccagtgtgtgtgtgtgtaggtctgtatacctgcattttctttattctttcatctactgatggacacttaagttgatttcctatcttcgctattttgagtagcactacaatatacattgaagtgcagttatttctttgacatattgatttgtttcctttggaatatatacccagcagtagaattcctgaattatatggtagttttatttgtaattttttgagaaacctccatactgtttttcatgactacaataatttacatttccaccaacactgtgcaaagattcctttttctccacatctttgccacaacttaccttttgtctttttgataatagccattctgtgtgatgtaatatttcattgtagttttaatttgcatttctctgatgattagtgatgttcaacattatttcatttatgtgctggccgttggtttgtcttcttttgagaaatgtctattcaggttcattgccctagatagggtttgaggtatcattttttctatttttttagtgtataattcagtggctttaagtatatttctgttgttgggtagtcatcaccgctatccatctctagaatgatttcatcatcccaagttgaattcatactgattaaacgattactctccattttcacctcccctagcctttaataacttccattttttctctatgaatttggctattttaggtacctcatataagtagaatcatacaatatttgtcattttatgtcttgcttatttcacttagcatatgtttccaaggttcatttatgttgtagtttgtatcagaatttcattcctttttaaggctgaaaatattccgttgtatgtacataccacattttgtttatccatttatctgtagatggacatttgggtgttctcacattttggctattgtgaataatgttactatgataattggtctaccaatatcttaatctctgtttttaattattttggttataaacatagaggtagaattgctagagcctaatggtagatacttttttattatgtgaccttctgttgtgaactttttgacactgggggggtagtaccttactttcctttatcaggtctgagcccagtacctgaatatagtggaaattggaccttatgagaccttttatgaggacaaggaaatggaggaactatcttcctgcttacacagtgacaagtcttatgacagtggataaggggttactggaatctaagttcctattacttgatctaagtctccccagagtcaggtccatggcaacccaaaacgtatctaccagcagtgcttcccgcagtatgagtgagtatgtttcctaaaaatagcatattctctgcttaactgcttgagtctttagtgctatatcatctgattgtcactatcactagaattaagtttcatgaaagcagaaggtttttacttttacatgctcttattacttcattgcctggcagatagccaaaaggtacttgttgagttagtgaatcaatgaatcaatagataaattcatagtggcttttccttatggaggaatttctctcctctactgccatatgaggaatccccagatgatgatgcagatgatgatgctttcttattcttgaatgatcaatctccccttcgatgtagtaacatcttataaaactaaaatacgatatcatgaccaagatgtcaacattcataaaaccaccaatagtattcagattttcccagctttactcatatttatgtgtatgtgtgcatgcatatgtgtgtatttagttctatgcaacattattacgtgtgtaggtttgtaaatccaccatcagagtcaatatgcagaacagttccaccattacaagggtccctcatattgcccttttataagaacattcagctaccccacatcttactcccattcctgacctctgccaactgctattctgttctctatttctgtaactttgtcttttcaagactctcatagatacggattcatacagtatgctaccctttcagaatgactttttccccacttagcataatgcccatgaaattcatccaatttgctgcatgtatcaatagtttgttcttttcattgatgagtgttattccatggtgtggctgtactatggtttgtttatctacccctgagggcatctgggttcccagtttggggctattacaaataaacgtagtatgaacacttaggtgcaggtttttgtgtacacatgtgttttcatttccttgagataaatgctcaagagcccaattaccagattgtataataagtacatgttcagttttgtgagaaactgccagactgttttccaaagtggctatatcatttgagtttccactagcaggggttgagtcatccagtttctccacaccctcaccagcattttatggcactattttttaattttaaccattatgataaatgtgcagtgatacattattgtggttacaatttgcattcctctattggctaaaaacattgaacatcttttcatatgcttgcttttcagatgcttgtgtttaactttactccaccttaaacatttgaggagtgtgaaggacaggagacacagagatttgccttgattaaggcaaataaaaccctgccagattttcatttccaaacacagtcctagacagagataagagagctggcagtttgctccattgtttattagagacctaacattcattctaaaacagaggcgttttactaaaatgcagtcagccttaattataatggcactccttggagctaggtggaagtactggtgaatttttctgagttgtaattccatactagaaagcatatcttaattttaaacatactttatgacattttatttggagatactccagttgacctctttaatctgcagtaatctattcatgtgctgaaagtaaatatatttggggtgcttgtttgttatggaaagtgattttacacatgcattttgtttaatttttagattattttcaaaaagcttcaatgctaagtctctgaaaatagctaaatgcaattaccttcacgtttttattattattattattgcaactaggcatttggtctcttaccttcaaatgttttacccctttctttaacaggttgatttagtgaatattggaagtactgacatcgtagatggaaatcataaactgactcttggtttgatttggaatataatcctccactggcaggtaagaatcctgatgaatggtttccttttgggtaacattaatcttgttttttaatttttacccttgacgtgtgaaacaaatgtgtatttctaacaataacaaaccctgctccatagtgctgctttttaaattgacactaccatgtcgtctgaaatgttaaggatcatcacggtataaaataggttctggtacatttacaggaatatttttcaaaattttatttcattgagtaagtataaggtaaaaatacaaagtcccaatcataggtgagtaatttttttcacaaatgtatgttctataacttgtctataagttaatttagtatgttttattttaatcactaccaaaggaatgaggctttctcagtcttgggtattcttaacataaattattgccaataaaagattagtagaatatgggtatctctatcaataaatgtgtgtaatacatacaaactccataatgtgatttggaaattatttttaagtcacctgagcatagggtcttccgactgtctatttgacctctgcaaaatgggttgaaggatttgtggaaaagatacagacacacacccgtgtgtgtgtgtgtgtagtatatatgcgtatatatataatgtgtctatatatacacacatatatacaatatgcatgtgtgtatatacacacactcatatccacacattatatatgtatatatatacacactcatatccacacattatatatgtatatataagaccaacatgaacttatatccactaatattatccactcattgtatacatatacataatagtataatcataatatgtatacataatcatacatgaacttatatccactaatattttccactcattgtatatatatacgtaatagtaactcgttatacacatatgtataaatatgtatgtgtatatatatataccaacatgaacttgaatttaaacttccacggttaccatcttagtggcatttggtatattgccacccctgttctgggccatggtcccttcactatcaaaagagtaaaaataaaaataaatgtgtatgtatttcttatcacgattaagtgggagaatatctgcaaggcactcagtgtagtataccacttttatttgaggtgtatcatatgacttgtattgattgcttaaagttttccactcatttaaaaaatttggaggctgagaaatgactgctgtttttactggtcgggattacttttttataaatcagcgtttttgaaatgtaattgttagaccatcaatgtactcattctaagtgtaaaattcaatttgcatcaatctggtttagttctggttcttggtagcctctcaaactattttgagggatgaataactcccccccaccacgttcattaaaatttgcaggatatttacagagttatatagccatcatagcgatctaattttggcacttttccaccaccttaaaaagaagtttcttctccatttacagtcatttttcactcccaccccagccctaggcaattgtcaatctatttctgtccatatgtatttgcctttttggatattttatatcaatataatacatgttcttttgtgtctggcttcttgcaatgagggtaatagttcagatccagccctattgtagcagatatcatggcttcattcggtaaacttgaatttttttattttttatttttatttttttttatttttattttgagacagagtcttgctctgtcgcccaggctggagtgcagtggcgcgatctcggctcactgcaagctccgcctcccggattcacgccattctcctgcctcagcctcccgagtagctgggactacaggcgcccccccaccacgcccggctaatttttttttgtatttttagtagagacggggtttcaccgtgttagccaggatggtctcgatctcctgacctcgtgatcctcctgcctcggcctcccaaagtgctgggattgcaggcatgagccactgcgcccggcttgaattttaacttgaattgtagattgctcttgctcagagtcaaatagtgagtagacacaaagagtacctattaaattcagcagccatgttgctctcctaattggcccccatatatttttattccaaattctctgaacaggcttaatgctacttcacaacagtaagcggggagaggggaagagaaagagcgggaattaatatgtgctggcaacaaagaatagctcataggagccttaagtgagcccaagttggccgattttcagcccgttccatatagtgatggtgtcaaatagaaccagcaagcaacataccgcatctctccccaaactgcttttcatatgttgctcagtacttctcaaaatatcttgaggaaggaacacttttcccctaatccattgtatgtaagatagaataaaaccaaagcgttacaaaaataagatgcccaacacccatgcttcctcctttattattaaatacattagacataaatggtactctgtaaaatcgctacataagtttcttgatgcactctgaattgttgactttatcttatggcatagtaacaaataattcctagagtgaatccagtttgcagatcccgctttgcgtaagacagatgtaagttttgacaaagccagcagaagaactcaagcatgcacagagctccaaaaggcactctgaactgtatttattgtttatactacttcttatatgatcttaccatttttaaaaatatcctgaagccctttccaactccatctgaactagtccaagataagctttcaagactattatgtctgataatttcttcacttgcttgcaagttgttcatttattattatttttttattttttatttttgagacagagtctcgctctgtcacccaggctggagtgcagtggcgcgatctctgctcactgcaagctccgcctcctgggttcatgccattctcttgcctcagcctcccaagtagctgggactacaggcgcccgccaccacgcccggctaattttttgtattttgttcagtagagatggggtttcaccgtgttagccaggatggtctcgatctcctgaccttgtgatccgcccgtctcggcctcccaaagtgtttggattacaggcgtgagccaccgcacccagcccatttttcattattagcatgtggaggcgcttttgcaatgaggaatatcagaaggaatgctttttaaatctttctttgtctgagacctctcttatagcctgttgtttttcatttatgcccttgaatcaccatatccttgagactgcaagactgtagactcttcccagcctctgcttacttatctcatctctcttatatcacactgccctgttctaaaactattaagcacactttgaaaaattatcttgctcagtgttcatcataatccagtgaatctaaaaatgtgtttttcttttttttttttttttttacaccaacattacatattttcttcctattaaatggtagaagcccttgaatttcagcaaagattaaaggacattttggtcaacttaatgtacattctagatctatcagataacgagcggcatttacagatagaaccatgttggcccctttttctaatgcaacatactatgttattaatagtgccatggaggacttctcattgaacttgtgaaaactcaggaatgcaaactctgttttcctattactgtttttctactgtccatctcaaataaaattgctagcctaaaacagtaacgcatattttgtaacataggcaggtttgaacaaaattgcaaagcatataacatgtgtttggcatctttttcttccttcttaagtgcaattctttttttttcggagtgctaaacttggctctggcaaccagctggttgtaataacaaatcttgctaacagtggtgagctatcagaagtcaggtccatacttttactggacaattcaagggatgtacttaatggcaacgctaattcactttagaatgttcatattattgatacaatttgcaattacaggagaatgatgacgttcgcactgctgaaagccatccctgtaaattcctgcctaccaagtcacttctgtgcaagacagttcttgctctgctcttctgcagagcttcacagaaactatccttaccatataagattattcctaccctcttcatttctattcctctgctgcaacttcttttaatcacagtctgggttctggggagtagacttcggagttgagtttggcaggcagcatgtttattaagccatgccctggaaaaaaaaaaaaaaaaaaaaacacctgtagaagggcagaggtgacaggagtggaaagaggaagaactagagctgtgacgtagaccctatgacacgcttattcaaaccccatagacaacttgcagctaggatgacccctcagagttgtctcaaatggggttaaaatggctgagtgtttatactctgccccttcatcagtcaatagtagtgggttgccctagagagggtgtgacattggctggcaggactctgcaactcaggtggtacctgagagaactaacaactagaagctgcctgaccacagctggagcaacaagcccttccttgaaggtcaatcttggtggtgcacctccatgtccatcatgccttcttggcccagttaactcctagtcatttttaaaaatcactgctcaaagacatttcaacttttttccttttaaaaattgatttatagttgtatgcgcgcacacacacaaatacatctgtttaaattgagcctcctttagagacagtgagacctgaggacgggacagttttctgtttacaggctcacctttggggaccagctcaatgattttttgataactgccttttatgtaggaaaaggagacatgattatcatacattgccctttattatttttttttgtctgagcaacatttgcacctaagtagaagcaataacagcgaggctgaggctgataagctgaattagtgacataatgatgctataaaggagttttggattgaatactttgttgtcctttaacgttatgcacatagagggcagactggccaagcatttcacaaatgaatcacattcatcattggaggattgcttgattattgcaaatccattaccaccattaagccactatctgctgattccaaccgtaatttagcacaggacacaaaatacacctcctgcagtcactgtacataaaggttgagcaatttataattttagaatatgagacaaattacgtaattatttgacctgtattcactgagtaactgactaaataagtaggtcaagaaggaattaggaaaacttggataatccactcctaaataataggcttagttatcaagggattgtgacagatacatgcaaagatttcatatctccgaatcgttactgtgtttacaaagcatcatctcaaatcttttaaaagtatgttaaaatgagatttagtagtatatcctaaaatttgcatttactttttaataaaaagatgactaacattggagatgttaaaatatgcatttaccccaaaggcatttgttaacttctatatggatgaaaaaataaaattgtcatatttagaatgcacaataaatattcatcatctgatcaaatgttgatagtatatgaaccttaaccttcccagaaggaaagtgcttagtggtacagactgatcacttttacatagatgtcttcttccagcatctcataaggggcttatatttaaaaagcagtctttaataaataataattctttaataaaagatgtagacagttttttctatgaagcgtcactgcattcatgaaacttagaaaaaatgcttagaatggatttctgcatcagatgactcagaagaattaaacttgataatctgttgaataacatctgcacatgcacgaagcctatgagacaatcaaatacatggaaaccaagtaatgaaaatagaaccaaggctacatatgtacacctcttagggataaatatttccttcctttgttgttttttttctttattttaggtaggcaaacatttctgtcttcttttcagttcagccaataaatatagcttgcgttaaatgatggtatgaaatcaggggttttatctgaccatattttgtactttgatcttacactaaccttgcatgtaagatacacagaaatgaggcctagaagaggttaagcaacttgtccaattaccacaattaatagcaaaggcaaaatttgaacatatactttaaaaaacaattatctatagtattcctcctatccaaaaagcgcttttatatcttaagtccttggttaacaataagtctaatgttttatacactgtcttctctagcttgttcattgaaagctagaaggtgagcaattctataaacagtaaatgttgggtctaatatggcagaatccaggagtaatagtgaacacattcagtaaatggtatggcatagataccaatgaatcagaatagactcctagcctttgagaatagacttaacttctggtagaatctattatgtctcattactaattggccctaaaatttctatttatcactgaagatcaaggacattcatatttaagtttgcatggttcttgctcaaggaatgcattttcttatgaaaatttatttccacatgtaggtcaaaaatgtaatgaaaaatatcatggctggattgcaacaaaccaacagtgaaaagattctcctgagctgggtccgacaatcaactcgtaattatccacaggttaatgtaatcaacttcaccaccagctggtctgatggcctggctttgaatgctctcatccatagtcataggtaagaagattactgagacattaaataacttgtaaaagtggtgatttagactctgatgacatatttttccccagtatggttccagatcatgtcctactttacaacatgttatgtacattgaccacattgatctaacgttccattggaatgaactaattaagaatattttccagtgttctatgggatacatataattcagttgttgaaacattaacattagcggagcgtgaaagtggttatagtggagggggagagtatcaatatgtttgacactgggaatcccagtaaatccaggttgtattctaactttgccgagaatggtgttggtctttttatacagataatgtgtttgtataagcctaaactatacaggtaaaaatgatactagatctcatgtgagtagttgtagttaaattaattaccatcatcagatacgtagtgtggagaaagaaacatctgtcttatcagatacacactttgatatcaaacaccataaagccctgtatactttgttctagttcagggtcataagatgctcagagcatttttagtaaccaagacaaagagcagaacacaattaattatatgacacaatgttttgaataccaacagaaacaattgcactggaacagcaaatcaattgctataaagcaagagagagatcttttgtggattttaataaaaagaattcactgtaatacagtgaaccaaagtccttaactatattccattcaacattatatttcttaagatgaaaaagattttttttgcttttcttgtgtaaagttcagtaaatgaattaataacagttcaagaaaaagcaaagcagtgtaggaaatacatatgtatatgtacacatacacttagagatacaatatatactatatgccatatatactacaccatttatactctatatatgtatatatatgtgtgtgtgtgtgtgtatatatatatatatatatatatatatgcttgtgtgtgtgtatttgagagagagggactacagtcactttattttggtcttcctgttacccgtttcatttacccaacccagggctaaatgcattgcctaattaactgtttaaaatgtcactggactgcatcttgcctaattttcagtgcaagttatgttttctcactttgatttttttttttttttgaccactctaccattttcctatgccaatcctgcttctagaaaagctaagaatattaattttctctaaggtaaagctcagtccaagagcaaacacatttcaaataagcatctttgtcaggtgtcttgctccagctggatttaattaaccccatcccgactgggtttccaggtgaattactcagcaacctgatttagaacagaggcagacatgcattcaaatgtcacgttaagcagcgttaacacattgtttctcgtatgacagaagaaaatgtttccacagcctcaatacagttagatgagaagggatagagacattctgtctgtgttttaagtcaatgctcatttatgcagccacatgcttaacactaagggcccgaaaatattgattttgctgttcatgtacacatttgcagatgaataaaaatatcaaggatcaggttatgtggtccttgttggctctctaacgtttttcccttcaagtggaagacttcaatcctgcaagcatgttcccactctatatttgttaatattctatttaatgatttctgaatacatttgtaggtaatacagtaaacatacccaaattgccctgttttatctgtccctgacccactctttctctgtcaaaatatcctcatttatatactctctcctgtcatattggatgaatcatcagtaactctctttatgtattacatggttacttttcaagaggttcttcacagttgtttaatgttctttcatgaatcatctcccccttctttttgtatttggcagatgttcatattctttatctaaagaaaaaaatggttgaactctctgttccatagcgattgtcgttggcacaattaggaatgtcatgaggtgccctcatttcaataattgagtggttcaactatacagaacaaagacatgtagttaatatagagcataaggattgactaagtgtcatggcagttaaaagttgtgtgataaaacgcaaagtccactacaatacccttcaaaggaagccagatttctactttttgtgttaaaacccaatgataattgcttagaaatatgtacaaaagatgcagataaaattacaataactataaagttacaattgtcttcctaaatccttattttagtgtattaccacagcaaattagaagcaaatgaacactagaatcaggagcaaagggaaaacagaaacacaatgtgtcttcatgaccccaatcttaacttaccttatttcaattcttagatgcagtcactgtcagctacttgtactttggttcctgctggttataataatatgtgtgataatgtttctacttgttgacaaactaatttctaacagtataggtatttactccatagtatgaaaaccagccatattatgtttcatccccaggtatttcctaattttattacttataatcattttatagttgtaatttttgcttttattacattaaatggtatgagtatacctcattttaaatttttaccaagtttagaaaggaacttttgaccaatatgaaaaacgagaaaatcatcacacattcttactctcgcctcttctccacctcccatttcggattacattctgtttgcatcagtagtatttgtaacatttatatcagttctgtaaagataggtgtttttggcttgagtctgtaaattgaaaatacatcactcttcttatataaatgtaattaacattacagcaaaataatagaaacgaatgtttttaaacaattattattttgtagacaccgttctaggtaaaatattcaatcaagttccatgacgtagatgctgtcattttacccatctcacaaatagataaattgagtcatagagaggttacgtaatttacctaaaactgtttggctaacatgtggtagagctaggatttaaatttacactatcctaatcatggtgttgatttaattaaaaatctggtgatccttggttgcaagtcaataaattatggtccaggttaacattaaatgctgtgtgggtttccttcatagttggttagttttacaatttttatgcatttgaaagtcatagatatttaaaatgttaattaattttaatagtataaaagaattcaattcatttttaatgctagacgtgacctcaaaggccttttggttcaatgctttttgaatgagaatgccaaagctcaaataaattatatgacttagataagatatccacacactcagttggttagttagtggccaaggaaatggggaaggtaagacaagggaatacagcacgaatgcataagcaatgctcttttttctcatcatactcaatttaaccttgtatactatgccatagatgagaaaactagtttctcatatgttcccacctatgtcctttttttactcccattgcctacagaaaaaaatgaagataaggcagagtgcgcatagtgaacttaaaagtcccctaaatattctacaatttttaaatttttttatatatttttcataacaaaggcattatccaatttgtaaataagctagtttccataagcttgttagctgttaggggtattggaaaatatggagggattcgatttcctaataattgtaaaaattctggtgtattaactagagtagaagcaattaagaagaaaccaataaacctatacctttatttatgtatttttttgagacggagtctcgctctgttgcacaggctagagcgcagtgggccaaccttggctcactgcaacctccacttcccaggttcaagcgattctactgcctcagcctcctgagtagctgggactataggcacgagccaccatgccctgctaatttttgtatttttagtagtgtcggggttttaccatgttgtccaggctggtctcgaaatcctggcctcaggtgattgacccgtctcggcctcccaaagtgctgggagtataggcgggagccactgcgcctggccaattttgaattacagttttagaaaaataacagctaaactacctttgtaactttttttttgtttttttcgttattttgtttttttgtttttgcatagcatgagctcttaaacaggagtccattaatagattcaaatattctaaaactgtatgtagactctgttcacagatatggagagtttttttgtaggagtagaagtttcatagctctcaacagattctcaaaggtgtctgtgattcagaataggtgaagaaccacttgactaatgacttccagtgctgttgggataaattataatacgttaacagccaacaccttatgcaaactcagccagtttctttcttttaaacctatctcccaccacttgatacttagaatcttccaatggagccaggcctgtgaggtcttgattatctgagcatgttttgcttttttccttccctaagaactttaattctctaacgctcacacaacttagaattctattatcaatacattttttttaatgcaagtcgaaacgtctatttaatctgtctttcagcctcagaaaactttcttgaccgcttcagattttacaaaacattttcttattgtctgtgttttttcacatttagagtttaattaattcatatggcttcttcatttttcttgctcattaaatttaaaatccttataagacaagaactgcctcttacactcctttgcattttctctattatcaagtaacatggtatgtaagtttcatgtgctcatccattctctcgtgtagttgataaatatttgttgagcctttattttgtgtcaggctaggtttccagcagtgaacaaaataggcaataaaagattgtacattctagtggaagagaaagatacacagagaaatttaattaaattatataatacgttaaatagtaagtgttaatgagaatagtataaagcagataaggagaaagaaaataagtatatgtgagtttgatttgaggcatgcagttttctttcatttatctatttaggagactggttcttcctcagtcacccaggctggagtgcagtggtacaatcatggctcactatagccacccaggctcaagtgattctccaacctcagcctcctgagtagctgggaccacaggggcatgccagcacacttggctattttttttttttttttttaataagttgtagagaccaggtctcactatgtggttcaggttggtctctaactcctggcctcaagcaaatccttcagcctcagcctcccaaagtgcttggtttacaggtgtgagccaaggtgcctggccagcatgcaattttagatagggcttgggcagggaagaacttatcagtgatgtgattttcgagtaaagacccaatggaagtaaaggagtgagccatgtttatgtcttcgaaaagcgaattccaaatccaagtgcaggaaactatggatcctgtttatggaatatgaggaaagagacaagaaataaaatcagagagttaatagggacctggaccctgttggacttcgtagatcacatgaaatacgtaatttgtacttcccctaaagcagagatttgagaagacggatatgatgaaacatgttaacagatcactctggcaactctgctatgcactaattaacgcaggcaagagtgagagaagagttatgaggctattgtgataattcatgcaagataaaatggattttggactagagtgatggcagtgaggatagtcagaagcagtcaaattctgaatacattttgaattaaatgttgtgtgagagtaaaatagtcattaaggatgactccaagggtttttatctgagcaactgcaattttaaacacattgttcattattgaggaagggagaacagcaagaaaagtaggtaggtttgggggagtatgatgaggataaacatcagaagctcagttcaggacacttgaagcttgtgattactaaatggagataatgagtgtttagaagaatctataatttgaagtttagggaagaggtctgggttagacatataaaactgggcattaccagtaaatggctggtattgaaatccacgagactggatgagatagataaatttttgttgcttggataagctagcgtagattatttgtcatcttcaggattttcttttttccccacatctttattgctgtataattgacaaataaacgttgtatgtatttaaggtatacatcctcagcattcttttttgatacagggtctcactctgttgcccaggctagagtacagtggcacgattatggttcactgaaccctcaacctccctgggctcaggtgatcctcccacctcagccttctgagtagttggaactgtaggcatgtgacaccacacccagctagtttttctttctttctttctttctttctttttttttttttttttttttttttttggtagaaacaaggtttcaccaaattgtctaggctggtcttgaacttctgggctcaaaggatctgcccacctccgtctcccaaattgttgagattacaggcatgagccaccacacccaatgagatcttccattaaaattattacttgtttaaatagaaatattttaaagggtaaatgaattacactcaagacttaaggactatgggcattggttgtcaatgaaaattaagcatggaagtaaatctcatggaacattctagattgatttatatttgtctttgtgtatgtgtgtatgtgtatgtgttttaggccagacctatttgactggaatagtgtggtttgccagcagtcagccacacaacgactggaacatgcattcaacatcgccagatatcaattaggcatagagaaactactcgatcctgaaggttggtaaatttctggactaccactgcttttagtatggtagagtttaatgttttcatctgagacttgtcatttctacacaaaatacaaaactacatatcttaagttttccaatactgtagatatatttaaaatgttcagccttcttgcactatattatgaattgtcttatttaattctagttctcaaaataccagtatctaaaattgcagtgaagacttttaggaaaaaagcctttaaaatgtgtatgccctatggatggagcatactgcatttggagtgcattgactccaaataattataaaaagttaatgttttgcttatgctaccaagagatttgatagagtaatcagctataattaattagctactcttgccaatttcattcatatactctataaaaggcaacatggtttactatttaaatcaggaaatctattcctgccactacttctgttgtaatttttcactctggggagatcctctgttggatggttactcattttctgcttctttagttgataggcagaagtgtatttatatttttattacattacacttcaataactttgactcttatctctggtgctacatagtcataccttccagacgtagagattacagagataataacactgtgacctctactcttcttctagcctatgaagtacactttttgccatgccaattttgaaatggtagcctctgttctcaattctcaaggctttactacactctaaaatcaggagttggaaaagtgaaatcggtgggattgaagatgatatttgggtagaagctgttctacaatagaagctgataattaaatgcttttgggaatattaaatcgatttcatcaattccaaaacaggagatctttcaatatggatggtaggtcccatcaagaaaactcaaaaatgacccagaagacagccttttgccagtgaatttattatcaaccagaatctagtactcagttttgcagacgcagaagcctgattgcctcagatcatctagcagatccacattggggtgggaggagttaactttaagtttaaaaagtgatatataaataaaaatggaaattcagtaatcttaaatgagatataacaagcagcagaatattcacatacaattgacaaatatattgctcttgataagcacatgtacttgggaaagcaaattacaacaaaaatgttagtttgtgaagttgggatcagattaagttgacttgaaatgtttcttctcctttggataatgcatggctgaacactgaatactgtaacccctttttattgcttctatacacgatagtatccctcctacccctgtttttagctctaagggagaaactattaatcctacgtccttagtttgcagtataggggaggattactttactattgactcgtagtacacatttgtatgttttctcttagttcagtgaggtagaaagggcagacataatgaaaatacggacttcaacctctgaggataaagagctatactgtatgaatttgaaagataaggctgttaatatgtttgttttttattgaatcacatatggtcagttcccattattggggtgtatgctctagttattcttgtgtgtgtcctatcctttcataaaacagtaagagaagatttaaaaatagatatttttcttattaagtgacaaaatggcttttgacctctagtgctcctttgaacttacagaataggagtgcctaaatgggcatccacatcataatcagaaaataggtaaatatatacacctatgtatatatccacaaaaaatttaaatgaataaaaacaattttaaaaagtaggttgacgagcctgtaatcagaaaaaggcaggtacatgaatagtgtattttatagctaaaagagcctggtatacctaactccatatgctctcctaagtgggaagtatatgtagaaaggtacattgtatatcctataagatcaccattttactgtctcaaacttcaacaatttaaaatcaacaaaatgtaatatgaaatacaggctgattaatgaagatccagccactgcttatggtctcgttttcccaataaaatctcatatctgtaaagcctttctatatatagactcttccaattgaaagagcatcttatcgcttaaacaggtttcctgtttatttgcgtagaggtgtttgtagtattctctgatggtagtttgtatttctgtgggatcagtggtgatatcccctttatcattttttattgtgtctatttgattcttctctatttttctttattagtctatctagcagtctattttgttaatctcttcaaaaaaaaacacctcctggatttgttgatgtttttttttttttttttttttttttttaaatgtttccgtctccttcagttctgctctgatcttagttatttcttgtcttctgctagcttttgatttgcttgctctggcttctctagttctttcagttgtgatgttagggtgttgattttagatctttcccgctttctcctgtgggcatttagtgctgtaaatttccctctcaacactgctttagctgtgtcccagagattctggcacattgtatctttgttctcattggtttcaaagaacttctttatttctgtcagaattctgttatttacccagtagttattcagaagcagattgttagtttccatgtagttgtatggttttgagtgagtttcttaatcctgagttctaatttgtttgcactgtggtctgagaggttggttgttatgattttcattcttttgcatttgctgaggagtgttttacttctaattatgtgatcaattttagaataagtatgatgtggtgctgagaagaatgtatattctgttgatttggggtggagagttctgtagatgtctgtgaggtccacttggtccagagctgagttcaagtactgaacatccttgttaattttctgtctcgttgatctaatgttggcagtggggtgttaaagtctcccactattattgtttgggagtctgtctctatgtaggtctctaagaacttgctttatgaatctgggtgctcctgtattgggtgcatatatatttaggatagttaggacttcttattgcattgatccctttaccattatgtaatgcccttctttgtctttttttgttttttttaaatctttgttagtttaaagtctattttatcagagaatagaattgcaacccctgcttttattttttttgctttccatttgcttggtaaatattcctctatccttttattttgagcctatgtgtgtctttgcacgtgagattgctctcctgactacagcacaccatttggtcttgactcttcatccaatttgccagtctgtgtcttttaattggggcatttagcccatttacatttaaggttaatattgttatgtgtaaatttgatcctgtcattatgatgctagctggttattttgcttgttagttgatgcagtttcttcatggtgtcgatggtgtttacaatttggtatgcttctgcagtggctggtactggtttgtccttgccatatttagtgcttcctgaaggagctcttgtaagacaggcctggtggtgacaaaatctctcagcatttgctcgtctttaaagcattctatttctccttcgcttatgaagcttagtttgactggctatgaaattctgagttaaaaattattttaagaatgttgaatattggcccctactctcttctggcttgtagggtttctgcagaaagatctgctgttagtctgatgggcttccctttgtgggtaagccgacctttctctttgactgtcctgaacattttttccttcatttcaaccttggtgaatctgacaattatgtgtcttggggttgctctttttgaggagtatttttgtggatgttctctgtatttcctaaatttgaatggtgggctgtcttgctagtttgggaaagttcgccgggataatatcctgaagaatgttttcccaggtatactaatcaaacttaggttttgtcttttcacatagtcccatatttcgtggaggctttgttcattccttttcattcttttttctctaatcttgtcttcacactttatttcattaagttgatcttcaatctctgatatcttttcttctgctggatcgattgagctattgatacttgtgtatgcttcatgaagttgttgtgctgtgtttttcagttccatcaggtcatttattgttttgcctaaactggttattgtagttagcaactcctctaaccttttttcaaggttcttagcttccttccattgggttagaacatgctcctttagcttggaggagtttattacccaccttctgaagcctacttatgtcaattcgtcatactcattctccatccagttttgttctcttgtttggtgaggagttgtgatcctttggaggagaagaggtgttctgggttttggaattttcaccctttttgtgctggtttttcctcatctttgtggatttatctacctttgatctttgacattggtgaccttcagatggggtttctgagtggatgtcctttttgttgatgctattcctttctgttttagttttccttcaaacaggcccctctgctgcaggtttgctggagtttactggaggtccactctagaccctatttgcctgggtatcaccagcagagactgcagaacagcaaagattgctgcctgttccatcctctggaagcttcgtcccagaggggcacccaccagttgccagccagagctctcctgtatgatgtgtctgtcgacccctgctgggaggcatctcctaggcaggaggcacgggggtcagggccccacttgagaaggcaatctgtcccttagcagagctccagtgctgtgctgggagatctgctgctctcttcagagccggcaggcaagaacgtttagtctgctgatgctgcacccacagctgccccttccctcacgtgctctgtctcagggagatgggagttttatctgtaagccgctgactggggctgctgcctttctttcagagatgccctgcccagagaggaagaatctagagaggcagtctggctacagtggctttgctgagctacagtgggctctgcccagtttgaacttcccagcgactttgtttacactgtgagggaaaaccgcctactcaagcctcagtaatggcggacgcccctccctccaccaagctggagcctcaggtccacttcagactgctgtgctggcagcgagaattacaagccagtggatctcagcttgctgggctccgtgggcgttggatctgctgaacttgaccacttggctccctggtttcagccccctttccaggggagtgaacggttctgtctcgctggcgttccaggcaccactgggtattagactcccacacaataatagtgggagacttgaacacaccccactgtcaatattagacagatcaacgagacagaaaattaaaaaggatattcagtacttgagctcagctctggaccaagcagacctaatagacatctacagaactctccaccccaaatcaacagaatatacattcttctcagcaccacattgcacttattctaaaattgacgacataattggaagtaaaatactcctcagcaaatgcaaaagaatgaaaatcataacagcctctcagatcacagtgcaatctaattagaatgcgggattaagaaactcaaaagtgcacaactacatggaagctgaacaaacctgctcctgggtgactactgggtaaataatgaaattaaggcagaaataaataagttctttgaaaccaatgagaacaaacacacaatgtagcagaatctgtgggacacagctaaagaagtgtttagaagagggaaatttatagcactaaatgcccacaggagaaagtgggaaagatctataatcgacatcctaacatcacaattaaatgaactagagcagcaagagcaaacaaattcaaaagctatcagaagacaaataactaagagcagaactgaaggagatagagacacgaaaaacccttaaaaaaaaaaaactcaattcaggagctgtttttttgaaaagattaacaaaatagatggctagccagactaaaaaagaagaaaagagagaagaatcaaatagacacagtaaaaaatgataaaggggatatcaccactgatcccacagaaatacaaactaccatcagagaatactataaacatctccacgcaaataaactagaaaatctagaagaaatggaaaaattcctgtacatatacactcttccaagattaaaccaggaagaagtcaaatccctgaatagaacaataacaagttctgaaattgaggcagtaattaatagcctacaaaccaaaaaaagcccaggaccagacagattcacagccgaattctaccagaggtacaaagaggagctagtaccattccttctgaaactattccaaacaatagaaaaataaggactcctccctaactcattttatgaggccaacatcatcctgataccaaaacctggcagagacacaataaaaaaaatttcaggtcaatatccctgatgaacatcaatgtgaaaggctcaataaaatactggcaaaccgaatccagcagcacatcaaaaaggttatccaccatgatcaagttggcttcatccctgggatgcaagattagtttaacatacagaaaccaacaaacgtaatccatcacataaacagaaccaatgacaaaaaccacatgattatctcaatagatgcagaaaaggcctttgataaaattcactacccttcatgctaaaaattttcaataaactaggtattgatggaatgtgtctcaaaataagagctatttatgacatacccacagccaatatcatactgaatgggcaaaagctggaagcactccctttaaaaactggcacaagacaaaaattccctctctcatcactcctattcaacatagtattggaagttctggccagcacaatcaggcaggagaaagaaagggtattcaaattctctgtttgcagatgacatgattgtatatttagaaaaccccatcatctcagccgaaaatctccttaagctgataggcagtgtcaacaaagtctcaggatacaaaatcgatgtggaaaaataacaagcattcctatacaccgataataaacagccaaatcatgagtgaactcccatttacaattgctacaaggagaatagaattcctagcaatccaacttataagggatgtgaaggacctcttcaaggagaactacaaaccactgctcaaggaagtaagagaggacgcaaacaaatgaaaaaacattccatgcttatggataggaagaatcaatatcatgaaaatggccatactgcccgaagtaatttatagattcaatgttacctcattaagctacaattcactttcttcacagaattagaaaaaaactactttaaatttcatgtggaactaaaaaagagcctgcattgccaaaaccatcctaagcaaaaataacaaagctggaggcatcatgctaccttacttgaaactacactacaaggctacagtaaccaaaacagcatgatactggtaccagaacagatacatagacgaatggaacagaacagaggcctcagaaataacaccacacatctacaaccatctgatctttgacaaacctgccaaaaacaagcaatggggaaagcattccctatttaataaatgatgatgggaaaactggctagccatatgcagaagactgaaactggaccccttccttaccccttatacaaaaattaactcaagatggattaaagacttaaatgtaatacctaaaaccataaaaaccctagaagaaaacctaggcaatacctttcaggacataggcatgggcaaagacttcatgactgaaacaccaaaagcaatggcaagaaaagccaaaattgacaaatgagatcttactaaatagctcctgcacagcaaaagaaaactatcatcagagtgaacaggcagcctataggatgggagaaaatttttgcaatctatctatctgacaaagggctaatatccagaatctacaagaaacaaatttacaggaaaataaccccatcaaaaagtaggcaaagggtatgaacagacccttctcaaagaagacatttatgtggccaacaagtatgtgaaaaaaaagttcatcatcactggtcattagagaaatgaaaatcaaaaccacaatgagataccatctcatgctagttagaatggtgatcatcaaaaagtcaggaaacaacagatgctggagagaatatggagaaataggaatgattttacactgttgggagtgtaaattagttcaaacattgtggaagacagtgtggtgattgctcaaggatctagagccagaaataccatttgaccaagcaatcccatcactgggtatatacccaaaggattataaattattctgtgcttatttcagcactattcacaatagcaaagacttgaaaccaacccaaatgcccatcaatgatagactggataaagaaaatttggcacatatacaccatggaatactatgcagcaacaaaaaaggatgagtttcatgtcctttgcagggatgtggatgaagctggaaaacatcattctcagcaaactaacataggaacagaaaatcaaactcggcatgttctcactcataaatcggagttgaacaaccagaagacatggatgcagtggagcatcacacactggggccttttggggtgtgtggggctaggggagtgatagcattaggggaaatacctaacatagatgacggattggtacagcaaaccaccatggcatgtgtatacctatgtaacaaacctgcacgttctgcacatgtatcccaaaacttaaagtataataataaaaagtttcttaaagtttacttatggctgcaaataagatgaggattcagcataagtcatatatttttaaaatatgtcaattcttgccattgtgttagggaaaccaccaagtacacatttatacatttttgctcagcatttttcaggagataatctcaatgatgattcaaagaaaaaaataataactcataagaatttttatttactgactgcttagtcacaaaagacagaacaccatctcttgaagtctcagacttagaacactctcttcgatagatttaccagcaaaattcgtgattcatgcctgtatagtaattgcttttgtgatgttcatatttttatttaaccagatattggttctgtagcttatgcatgatgttggctactctccaaagaaatttcattttaaattagttatgccccttaggagaataatgaaacatttggggagaattttattattgggggattgaagctatatttggtttaagaaatacctgccaaataatgctttgacaattttaaacataagctttgttgatagaattgctttataaaattaggaagtcattgaaaccttgtaggatttcatatatagaatttgatatgctttggccttaactggtgttttgaggcctgaggtttagttttaagtggaattgccttttaaaatgagtagcagtaggcattagcataagcgatttcaggagctgtttctagtgtgtttagatgctaacatatgcaaaaataagtacatctagggtaaacttaataaattatgtatgtttatgctcatagataataggtatatctctttaaaaatatccttttgtgaatcagacaattctcttcccgttatgatttctctgtaagacagtacattctacatgcgttggtcgtgggtttcatatacattgtttctctgagtttcaaacagattggtttgtttgccagtccaaaaaaaaaaaaaaaatcctccctatattaagagagtgctttgtcagctttcccctgtgaataacaaagtgaggatgttctctttaaaggaataaaacaaaaaatcagggataaaagattgcgcctgttctagatgtcttttgaatattagtgtagaaagccatttccatttaggatatgaaatatgatatggaaatgttcttacttatttaccagggtaactttagaacaaaaatgaataatgacagtcaaatttgaccaaaaaaggaaggacactaggactcgagagaaatttttgtatcctcaaaatgacatttacaaacccgttagggtttggttttaatcccctttattttgacttcctgagaatggtgacacggattctattttctgcttggctaatccctgcatcactcttgagttgtttttatagccttcttttccaagaattagctctgcctgttggaaagttttactcctggagtgaatgctttcagacttggctttgtatgcatgcaggattttaacctacaaaaataatcatggaaagatacatagaatttgctataaaagagaagaatatttttaaggcctcttatgttgggtttgatatcaattggctgaacaagggctgttttaacttttttccgcctctgctgtaatcatcacattttgataccataatggcaagaaatgtttataagtttacacaggttaaaattgagagggttaattctcaggaggattagagttaatttaaataaataaatatttttgtgaacataaacactaattttatatcatttagattgatttttgtctagaactcattatagagtaccttgttttcagaaaatctaatgcgattgcaatattataggtgttccttctctatatacggtatttcaactagaaatccttactgtaaatatttcagacaatttagagtcaaactctgcagttgaaaatatatttaagaaaatatttaagaaaatatttcactggcacttacatgaatgaaaaatggccattgcctttttgatgacaaagtaatatataccaaataggtatgatacagatgattatattaacattcagatattattgtagcaatttcctcttccctgatgggaaatcttgaaattgctcttcatgacaaaaattaagacgtaaatgttatttcccagtggcctaaaagttagaagaggcatgagagtattccagtgtgttctcttgatgttatgtgttgtacatctttctcagttcagataccataaaaaaactgagtattttctgggcagttggaaccagtcactaataaatgaaagcaatttttgttctccttatccatttcagttgtttggatgacaaataattgcatgtaactgtcccaaattcacctacttagacaacagagacttgaaaaacattaaatatgatatttgtgtgtgcgggagcctggcttgaatttaccctttataacaaattttggtattttctactaatctttcacattcttctatgatttgtcaccattttaactttatggaaaatggtcaatttataatttctatctcccctaggggctgatttgttaaagtatgctttagttaagtaagagtttcttactcagttggggaatttaaataatgaagtataatcatgcgattgaagatgtgcattatggattaggttctatgccaaatttgttcagaaacatttaaatataattcttacctagataactgagaatctcttttcaattagcttaccaggattattttcacaactttttttttttaattacaggtgaaataacaatatccttggcctatacagtgacattaagtgatttttgaatgattgacaagacattaataaattaataatgagaaatgcagccatgaggttctaatgctaaataatatgtaatagacactttgtggatggttttcctagtcatatcatcacaatgagttcatgagactaaagaaatatattaaaaacatctattggtatttgttaattttatttcagctatgaaggaatacatgagatattaggtttgattcagaaaagtgttctatagttgatatctgtgtttcttgtcacagaattttgccttggcaaaaacattttgaccattctaatgatggtaaatgagaataaaatggcataagtagtttaaaattttctatgtggttttaagtcagtgataatatttgaatgtaatgtatattttgctgatagttggaaaacttacttcactgtcttcaaaatggagttaactgtgttttatacataattataagtgatatcacagggctgggtgtgatggctgacacctgtaatcccagcacattgggaggccaaggcaggagaattgctttaggccaggagttcaaggctgcggtgagctatgattgtgccactactctcaagcctaggcaaaagaactgaggccctgtccccccatcccacaaaaacaaacaaaaaaagacatcacagaacctgcaaatgaatatccaaaaaccttaaagctgggcactggaaaaatagatattaggttggtacatatgttttccaattaaataatttctatatataaaatgcatgtgacattttacagctggaacatgaaatataagatgaaaatatactattttacaacaatatttgggtaaaataatgatgaactaaagtctttgttgatgtcatttaaatcttataagagggaaatttaattgtcatacaataggatttattccttgcagagggaaacctgaagatttatagttgtcttgtcattttattttaaagcaataagctatcctcttagatttattctctttttagaacttttatttttattgatgcataacgttttacatatatgtacatacatgtgatattttgttaaacgcactgaatgtgtaatggtcaagtcagtgtatttggggtattcattactttgagtatttatcatttttatgttctgtgaacattttgagttctctcatctactttgaaatgtacatcatattgttgctaactctagtcacccctttctgctgttgaacattagaatatataccttccaactatatatttgtacccattaaataacccctttttatattcccttcctacccttcctagcctctggtatcttattatactctctatttccatgagaacaactttttttacacctatatatgagtaagaaaatgtaaaatctatttatctttgcctcgattgtctcacttaataacctgcagtttcattcatgttggtgcagaaaatgtaattcttttttatggatgaagagtattccactgtatatatgtaccacattttctttatccatttgttcactaatggacacttaagttgctattataaatagtgcctcaataagcatgcaagtacaggtatgccatgcatatacttttcctgatagttagaaaagtatatgattgctttccctttacatatatacttattagtggcattgctgacacatactctatttctatgtttagttttttgagaaatcttctccatactgttttcaatagtggctatactgacttatattctgaactacaacaatgtattaagagttcccttttcgttgcacctcgtcaacatctgttgttttcttgtctttttaataatagccattctaactggggcaagatgatggctcatcatgacttgatttgcatttccctaatgattagtgatgttgagcattttttcatatacccgttggtcatttgtcttcttttgagaaatacttattattgtcctttgtccatttttaatgtgattatttttttactgttaaattgtttgggatcctcgtatttcctagatattagtctcttgtctgaatagtttacaaatcttttctcccattcagcaggttgtctcttcactctgttgaatccttcctttgttttacagaagctctttcattttctacagtcccaattatctatttatgtttttgttgcctgcgcttttgaggtcataaccataaaatctttgcctagaccaaggtcctgtctgttttccctatgtttgcttcatgtagtttcagttttaggtcttacctttaaatccttaatccatcttgagctgaattttctaatatggtgagagacagggatccagtttcatacttctgcatctgacaatccaattctcagcaccatttgaagaaggtgtccttccccctaatgcatgttcttggtgcttttgtcaaaaacaagttgtatgtaaatacatggatttaattctgagttctctaatctattccattgttctatatgtctgtttttattctaacaccttgctgttttgtcaagtagtgtgattcataagtctttgttctttttgctcaggattgctttggctattcaggctctctgctggtctttgatcgtacaaattttatgatcactttttattccatttctgtattctgatagggactgcattattcaatgtagaatgctttgagtagaaagatcatgttaataacattaattcttctgaccgataaacatgggatgactttccatttgttggtgtactcttcaatttgttttgtcagtgttctgtattttatacggacctttccctcctgggctaaacttactcctaggtattatttccagccgttgtaaataggtttgccttcttgatttctttctcagccagttcattattggtatatagaaatgctactgaattgtgtatgttgatttttgtatcctgcaactttactaaatttatttatcagatctgagagctttctggtgagggtttagctttttctagctataagttattaacaaagagcagtacttggacaacgatttcttctattaggacgccttgtatttctttctcttgattgctctggctaggacctccagtactatgttgaatgagtggtgaaagtgggcatccttgtcttgttcttttttttgtttttggttttttgtttttgagatggagtcttgctctgttgcccaggctggagtacagtggcccaatcttggctcattgcaagctcagcctccagggttcatgccgttctcttgcctcagcctcccgagcagctgggaccacaggcatctgccaccatgcccggctaattttttgtatttttagtagagatggggtttcaccgtgttagccaggatgatctcgatctcctgatctattgatccacccacctctgcctcccaaagtgctgggattacaggcgtgagccaccacgcctgaccattccagttttatagggagaaatttttcagcttttccccattcagtttgatactacttgtagatttgtcatatatggtctttattttgttaattttttttgtatgcctagtttgttggagtttttatctcgaagggatgttaaattttatgaaatgttcttttgtgtctattgaaaggatcatgttttctgtttttcattctgtttgatgtaatatgtcatatttattgatttgtgtatgatgtatccttgtatcattgggataaattccacttgataatattacattttttatgttctattggattgctagcattttgtagagaatttctacatcagtgttcatcagggatgttgtcctgtattttttgttgcataattgtctgggtttggcatcagggtaatgctggcttcatagaatgagatagggggaattccttcctcttcaatttttcttggaacacttacaggagaattggtaaagtttggtagaattcagcagtaaagacatctggtcctggactgtcttcgttgggaaattttttaagattactgattcaagatcattactaattatagatctgttcagattttctatttcttcttgatccacggttggttgtatgtgtccgggaatttatacattcctctagatttttagtttattatttaatagttgttcagtatagtctctgaactttttatttctatggtatcagttgtaatgtctccgtcttcatttatgattttgagtcttttttttttcttggttagtctagcaagtgctttattttcatctttttaaaaatcaaacttctcatttcattgatactttgtattttttgctctctattttcttgagttttgctcaatttttaggattttcatccttctactaattctgggtttggtttgtttttttttctttgactagctccttgaagtactttgttagattgtttgaaatatttcaacatttttgatgtgagcatttttgctatatacatcccccttagcactgcttttgccatatcccgtaggtgttattatattttgatattcatttgtttcaataattttttgaaaacatttcctcaattttcttccttgacccaatggtcattcaggagtatgttgttcaatttccatgtttttgtacaggttccaaagtttctctttttgttatttccttgtgttttaagaagatattagatatgattttgattttttataaatttgttaagacatattctgtcataacatatggtctgtcctggagaatgttctgtgtgcttatgagaaaaaaatgtgtatgactgttgaaggaattgtcctataagtgtctgttaggactatttggtctaaggagcagtttcaagccaatgtttctttgttaattttttgtctaagtgatctaatgctgagagtggggtgttgaagtcctcagatattactgtatttgcatctagctctccctttagatctaatacttgctttatatatctgggagctctcgtgttgggtgtatgtatgtttagaatttttatatactcttgctaaacttatccctttatcattatataatgaccttattgtttgtttttactgtttttgactgaaagtctgttttatgtaagcatagctgctgcttctcccctttggcttcggtttgcataaaatatacttttccatccctttacttcaaatctatatgtgtctttacaggtgaaatgagtttattttaggcagaatatttttgggttatatattttttaatccattcagccagtttatgtcttttatgtggaatgtttaatcaatttacattcaacattattactgatatgtgagggcttatttctttcattttattgatttatggttgttttgaatattttttcttcatttttttccctcattatcattatagtgtgatggtattctttagtggtaacatttgagtaacttttcttgattttttttgtgtgtttgcactactagttgtttttatatttttatgtgttttcatgatggtagttgtcattctttcacttccaggtataggactcccttaaacctttcttgtaaggccagtatcatggtgataaatttccacagctttcactcgtctaggaactattttatttctccttgatttatgaaggctaccttggctgggtagagtatccttggctggtggttgttttctttcagcaagtttaatataacatctcattcttctctggcctgtaaggtttcttctgagaaattcactgttaatctgatggaggtttctttataagtgacaaggtgcttttctcttgctgtttttagaattctctttttgtctttggcttttgagagtttggctataatgtgtcatggacaagacatttttgaattgtatccctttttgagatctttcagcatcctgtatctggatgtctaaatctcttgctagacttgggaagatttcatctattattttgttaaatagggtttctaaacctttagtttctcctttaccttctaggacataaaaaatgcaagcatttcatggctttatggtgttgtatatgtcacataggctttgctcatttttttaaaattttttgttattttttgtttgagtaggttattttaaaagacctgttttcatgttctgagattcttctgttttatctagtctcctcttgagtctttgcctttgattctgaatgtatatagtagtatacttcctgtatgatttctttggatgtaaacagtatgaatggtgtctgtaacttcctcagtagcttagggtgcagttgttagcagaagctgtggtgaagttttgccggtgactgggacaccaagtggtccagtcttcaggccccagtggtggcatcagttggttgagcgtgcctgtcctcaggcctcagagctgtgtacattggcattgatgttagtgtgtccaggcaggctaaccctttggcttataggtggcttgcttggttgtcaggaaaagcataggtgggctgggtgggtacacaggttcccagcccaggggcagcaagcatggtgcgggtaatggcaatagtgggaggggggcaaccctctggaatgcaagcaatccatgatggtgttggtggtggatgcaacagattgggcaagccagttcctaggcctgcagatggtgcatgtaggttgacgccagctttggtggtagtggaagcttgagtgggcccaaattcaggccccaggaagactagtcagatgccaatggtggtaaactggggtgggagagccccaggtctctatacaaatttttatgtactgggggatttggaagagcagagctgggaagacctgtcctcaggactcctggtggtgcatgcaaccactggttattgtagtcgaggggcaaggtgctccccaggtcccttgtgcaatgctcaggtggaaggcagtgttggctacactgtggccctgctactggagagggtaaggttgctttccttgggagcagccataagcagttgcctgggtagcctgtgcgtcgcttgtgtctcaactccacagcagttcacagtgacagcatttgcaggcagtggaattagtcttcagtgtgcatgaagttgagtggccacccctctgttgggcaggggagggtttgctgccagtggttcctgccttggccccagcagttgcagccatgggtgggaaatatcactgagactccaggaatgtggagatagggaagatttttagtcctaggtcaggacatagactggtgggggctgggctctcaaaaccaggccatgttgcagctgcttaggactctagagtttgtggaacccagcatgggcttcttccgtgaagcaatgcctttgcacagtatctagacagctgtgtgttggtttgggggcccacacgggttgaagggctctcaattggctaggattgtaggaatcttgtacaagaatgtgtacctttgtgcatctctaattctctccccatgttagggagcctctccagactcctagccaatctcagctggatagagtgcctcatttccttctttttccttttagtggttttcattgcttctctgttgaatttcagtgttttctcttagttaatgtattcaaagtatgattatctacttggtactttggttcctctccatggaagaggtgagtaacagatccatcaattcagccattttgaagccccagattttttgtcttatggcaatcgtgtggagttagtggatcatatgatatccagttgaaaagtgagaaaactgttacaactattaaattattaggaattttatatattattacaatttaataaggtggttgaaaccagtgtttttacttttaggaaatatcctgtaatatcattcttgtgagatgttaatattgctgaataaacttttgcttcaaatcaaagcacatttttcccctgcaaagatttttctaatttatcatcagtgatataaactcaaatttgcaagttccttttggtagaagagtgcaaatgtttaagtagggcagtcatgttctagataatttccatactttatcttatgtcttgtacacaacaattccaggtaagtttatccttcttttataaatggaaaaactgaggcttagagagctttattaaaatcaagatcacacagccaatagataactgagctataatcaaatccagggtttatctcttcttaaagtccgtgttatttctcacaagactgtccaataaaatcggttggggaagctttatggcaacactgggattgaaactagtattttatttcactgaggacgggctgtgacatcagcaatttttagaagctcagtaagtgagagtatcctgcagctaagatagaaacaactacaatggaacaattgtttctgtgagatatgcccttttataggataagatccagaatctgttgtcccagcatttgtttagacttctagcattttcttccttaaaaaatgactaagcctgctgttcacatcttcaattactggagtactgcttattgctaacagttctgttaatgagaaattgttcatccacagacaaagtaaaaatagactagctgtcacataagactggccatcaaaacattctctttaggattaagaaacttgccttatctcctgtctgcacagttgtctctcttcattccttcttctatttattgcttcacggacatgtttgtgatagaatggtactctgactcaaacagtttccagcaagggttgcccaggtgagaggagctgtttgcagaggtgatccctgactctttgttctttaatttatttcttcttttgcctgcctctctcatcttgttactaattgacatcactgtgttctgctatctgaggtttgttgatgccttttgcagccaataaaaatgtctttcattggcagagctgataaagaactagaagaatttttaataataactaagggctaataagggaaaacaattaaaatgatggtaaaataatagttttcaaattagaagtctgatcccataaatccacttgaaataagcaaatggcttaattttatgatctctgatattaatgccataaataggttgaatttatttaccatttatccagggttagttttgctaaacagtttgtattttagccagatatgcaacttttactgacaggacataatgaactttggagcctgcactgttagtgtagttgtaaggagataaaattggcaattatactcacagatggaatagaatttaatctatgacatttacttagctgtacagaaggatacaaggcaggagatacactgtcatagaatctttgtatcattggatggcccagaagcaaccaacatacagatttccacatgcctctcacccaaatgtgctccatatagctgctaggacaacggccaaaatcagtgtggtttacttgacatgaagaaattgcagcattaatttcccaccaatatttaataccattgttgtcacataggacaaaagactatatattgcctctctgccccactccccagttaatttaatagtagtcctacctagcaaacaagagtgacaagaaattctactattatcttaactcttaatcctaagaaaataagtttctatgttcattttcctaggcagcatcagattaacctagggttgatttaactttttctacacagagccaactagttttgggttaaaatctgatttttgcctttattagttttaggccactggaaaattattgaggctcagtattgctcacgtgtaaagtaaaaatatttacctcccactgctacttcaaggagtaagtaaaacctgtatgtatttggcccgtaatatgagcccagaaacagtagctaaagttatgtcaaataactggaatgttgtaaaaattaaatggtccctttatactcctgtagggaaaactgatctttccagttattttgcctgcctctagaataaatgctgactctccccaaattaaatacaggagtcctcccttattcattacagtttctgctacccatggtcaaccgtggtccttaaattgatgagtacagtacaattagatgatggtggggagggtgggcagggagaggtgagagtccacattcacgtaacttttattactgcatattgctataattgttctattagttattaatctttttctgtgcctaatttataagttaaattttatcataggtatgtatatgtatgggaaaaacagtatatatagggcctatttgtggtttcagacatctgctgtaggtcttggaacatatcccccgtggaaaagggggatctactgtcatttcccatttgaaatcttgctggtcttcctgtgaccttcccactcattctggttttctggtctgaggaatactgctggctcacagctggtgtactgggtggtaatctttgatatccttgagctccagagtctaatctagttttcataaaagatttatactatatcttaaattcctcagagtggttctctctctctttctctctctctctctctctctctctcacacacacacacacacacacacacacacacacacttgacagagagattgattcacagttgtcatggatacatggtagatttctagcaagtctcctgaaggctggttcatgatagtaccttataattgtcatagtatttgtaagacattagttagcacacttgcaaaagtataactaggttttctcttgtagtcattacgtcatatgacatcgtaaaagtggttgaattggttcccagactctcagaaaaactcaacttctgaagctgggagtaatacatacatagtaatattgatgtaatctggtgtgatatttattaaacattaagtgctgggcacattgcttgatattgtataatttcgttttatttctgcaaaaactctaggaggtagagactattattttggtcatttgcaactgaagagtttatgtaaattgcccacatcactcagctagtgagttggagttaagattccctacttgtaactactacagaatataatcttatggcagaatattcctctcttcttccatgaatattttctttgcattaactaaaaggttactcattttattacagggctaattgggtttgtttttaattggatgcacatccatcagttgattccaaatgttttgaaaataaatggaaaagttttataaactagagccagaataagagggatactgaattctttttactatgatgtttccttgagagaatcattaaataattaaagtagaaggatgtttacaaatcttgcaagtatgacattctatccaagccacactaaagttatcaaagggagacactcaccagttatgaaaatattcccctctactctttctcagttaactctaaaattagatggcaaaggcatcaaaacatctcactatctcaaatatttcctcagtgaggtcgtgatgtgaacatctcttatctagattgaaatcccaccttgagtcatatgtggattaaaaaaaaaagctattatctgagaaagtctaaataaaaagatacattttacctaggctttaatatctaagtttttctgtatagaatcagttgggcaagtgagtctcttggaaaagtgatttgaaaactgtttttattaataattggaatacacacacacacacacacacacacacacacacacactcttattcctcctcaagaggcaagagtacatggtgaagcccttaataaattcacctcactgtagttaaacagcagactatgatattgttgtagttgttaatcaaagggactctgaaaagagacagccagaagtggggaaaaaactagtatagaaaaataacgattgggcatttgagtatttggaaaaaacctggtgaagtaactaggttttaaaagactgaagagaaagacaaatttcacccattgcaaaatataacaacgatataaaaatgagacataagctcctggataaaaataaataatgtatttttttctctctattatatctcgaattttgctttcaccaacaaactgcatgtgaaatacgaaaaaagttaaaaaatatggaatattaagggactataagatgagaaatttttaaattgttataacctaagtaaaactgctaaagctagttgtagcgagatctgtcttacataaattttccattaaatgataatatctttgcattcatcataaacagaaatgtacattttaagcaaaatcattataatagaaatgataatactccttacctagccttcttcacgttaatcttaacatagactagtgaagaacatagcaaaggtagtgcttgaaggaatgttcttattgaaagaaatctttcctcagattgatcaagaggcattgaataatcataataattcaaactttaatcttgcagatggaatgaaaatgtttaaaattagaattattgtcagagcttaaatattgttacttacacaagccaaatacattaatattatgagcactattgttttagctaatgtgtcttttactctgcagagtacatatagactagtctaaaaggttttttttttttaatgcttttatagagcacgagcatttgtgcaggtggctgagtagactaagattttttccaatgggttgatttgaccacatcattaataaagtagaaattctggagcccctactttttattcttagtctgacattgtaaattctttcagatgctacataagcattttaaagttatgtgccccaggcttactttgttcagtagaaatgcatgttaattcatcaaatgtctattgataactttacataaggaatagtgctatatactccaagtgtgtcaggaagtaaaagatatacagtctgccaaggtattgaaaattgcatataggccaacaaacaatatataggtaactgttatataagacagaatgtgaactaattcagagaatattttttaaagtacagagcatgtttttcattctaataaatgtacaaatatttatgtcaaatgaaaatgtggctgcatcataattcttatatgggattttaaatataccaaaatccacggatccatacagtagttcttactctgcttccctaattttattagttggacataaatgcataaatcgataagatgattttggagcgggaacctaactttttctatagttccttggaagttaattgatttcttaagtgataaagtccaccactattttgagtaaggtttagttaatgatttctgtttaacatgtgtgatttctaataaaaagttctggatttattttctcttgttgaaagttgttcattagaactgacacctgagctaacataagcaaaagtcattgtaagtccacacgtttgcacagatgggtgtccccccaccatccttaggtttgagcaatggatttttacaagtgaaactcagtgcaattaatcacctccaacatgagaaaatgctctttaaactattttaagtcaacatttacaagagaaattggcctataatacacctcgggttcttaacctttttgagagctatagaaacgctgcttctctataaaggtaacatatattgccaataaaatacataagggaggacatctacttataaaactcagaaaacgatttaataggaacagttgttttattagccttctgctctttaatggctgagatcatcctggggctatttaaaaatgatttaatttgtcctctaaacacacagatgagttccaggtgtgtatttcccccccccacccccgctccatgaatcaaccatgtctgcactgacattaatagcttggatcgggaaatctctgtaataataaatctatcttttaagttggtcatttaagcagctttaagtatgaaaaaagtgaagtattagaactatttcaatccatgatgccttatagattatactttaagaatacgactgtgcctcactatctgagaactggttctaggaactccagatactaaaatctgtggatgcttaagttccttatataaatgatgtcatatttgcatataacctatgcacatcctcctgtttacattaaattatctctagattacttataatacctaatacaatataaatagtacgtaaatagttgttacattttattctttgtgtttaatttctaggttcagggttacacatgcatttttgttatatagataaattatgtgttacaggggctctgagtacagattactttgtcacccaggtaataagcatagtacccaacagggagatttctatcctgttaatttttattgtatttcctgaatatttttttatttgggaaacaatttattttttttggaaatttttgtgggtacatactaggggtgtgtgtgtatatatatggtatatatgtgtatatatatgtgtgtatatatataccatatatgtgtatatatatgtgtgtatatatataccatatatgtgtacatatatgtgtgtatatatggtgtatatataccatatatgtgtatatacgtatatacacatatgtgtatatacgtatacacgtatatacacatatgtgtatatgtatacatatatggtatatatgtgtgtatatgccatatatctatatatatggtatatatatatacatatatgtatatacatatggtgtgtgtgtatatatacaccatatatgtatatgtgtgtgtatatatacaccatatatgtatatgtgtgtgtatatatataaacacaccatatatgtatatatacgtgtgtgtgtatatatacacacaccatataggtatatatatgtgtgtgtgtatgtgtgtgtgtatataatttttgtgggtacatggggtgtttgtgtatatatgatatatatgtgtatatgtatatatatacgtgtgtgtgtatatatatatggtacgtgagatgttttgatagaggcatacaatatggaataagcacgtcatgagaatagcatgtcacctcaagcatttatcctttgagttataaactaattacactcttgaagttattttcaaatgcacaattattgactatattcaccctattgtatcaaatcagaggttatttgaatttgcagatacagaacccgcagatacggagggcccactgtatatcactaaatcattcatacctctccacctgtacaaccaccaccatagttcaagttattctcatctttttctgtgactgcaggaagaacttgacaatgactggccctattttctttctggatttaacttaattctcttttacacacaatcatctagcatgatatttacatagtttaaggccttagcacttgctgttccaactccctgggatgttgttcttccactctgcatttcacagctgaaccccagaaagattatgtcctttgttgatttaacccttctcagaatagcatgtgtctctgttactgcatacatattgaaactattcttagttttttgttttgttttgtgcttatgttatcacatactatacacaccaagtctgtaggctgtttttttgatattctagtgatttttaatgataatatttaatacatatatgagaaaagaacctttttaatgttaagggagagcatgatctgtgaaattatctgtctttaatttatctttggaaatgaacatttttcaaagttttcattagattgtattcaaaattggtttttattctaaaaaattaccatgttactatttcatatttaaatgcaactaggattagacaagcaacaataataatttttttcttacctgggagcctacatgaatactgagtgtattaagatatcaactgagatatcttgctatcttagtttgaggagaataccatatatttggggaaatagagagaaagtggagtgaacatgtaatttatgtctcttaaaggtgactcaaatgttctttatctgtatcttaaaatctttagtgagcattcttccttatgtttaggctagttttctctctgagataggtaaagtaagctactttgccttagtatgcggatgtatgtgtgtgcacgtactcatgtgcccatcttgtcaatacatggagagatggaataagacgaatgtagtatgtctggggtagaaatttggttgcaggagagaggctgacacattcacaagcagcagcaagggaagagggattactggagtagaggcaagggagaatttatttacttaattacataatacttatttagaatctacagtgttcccggtatattgagttatatatgagaatgcaagaaaatgacatcactagtttaaagatacaatgtcttctgtttttcaaatgtttcgttgattttgttttattcaatactgtttagtacaatattaacagagtaaacaacagtatgagtccttctcatgtttcactttgattgtatcattgatatttaatccaacgtaaaattcctaaccttcaaaaaataattctcacttaatgttccagtggagtttgttcccaccatagtactgctggcctatcacaatgctgtaggtagttgtagacttgttcagtcctgttattggtggtgacttcctcatgtgctgggacctttattattcacagctgaattcccagagcataagagtgccttttttttttttttttttctttttttgagacagaggctcgctccgtcgcccaggctggagtgcagtggcgcgatctcggctcactgcaagctccgcctcccgggttcacgctattctcctgcctcagcctcccgagtagctgggactacaggcgcctgccaccatgcccggctaatttttttattttttatttttttttattttttttttatttttagtagagacggggtttcactgtgttagccaggatggtctcgatctcctgacctcgtgatctgcccgcctcggcctctgaaagtgcgagtgcctgttttttaatgtacaacaaatgtttcttgaagacacggcttttacattagcatattacatgaaagtgtgagggtcattaatatgtgtgaagaccagttaggattttaaagttctgatcagatacgttatcaagctgatagattaaattaactgattaatccaaggaattaacattaacaagcaatgaaatggtcagtatccaagtattgaagttgtatttgggttttacctaatattttccttgatcttactggctactttgttgtctaagctgaagaaaggccttcctgattacctttatttaaataaaataacagtggtgaaggtaatttcaaaaaatattaactatgctaaaacatatacctgtggtttgatatacaagaagctgcagaaggttctcagaaatatgtaaaacaatttattcccaaggtaattgataattgtatgcattcttacagaataagctgttataaaatttcaaactttatctaaaactcaatagcacgtctcataaaatgaactaaatagttctgtcgggcataagaatgtcggcttctagtatagaattccatgtatggtacaaaagttgtagagagattgtgtaattgctacattcatcgtataattttagaaaaatcctcttggtaatttatatggtaaaaattgactgttacaattagaaacataaggcatattttgtctcaatggattttattgagtatgctaaagcaatacacactacatatcgggtaagtgtgtgtactatgaggggagaagtatatggatacacagatcatgatttctatgtaaaatttatatcaggcttgtatgggagaagatacatgacaagttaaaatataaaatgaccacataattaaagtataatttaaattgggattattataatttaaatattttcccaagaatatcttgaatagtaatctttaaaatttttctttttttgatttttttattatacttttagggtacatgtgcataacgtgcaggtttgttacatatgtatacatgtgccatgttggtgtgctgcacccattagctcgtcatttaacattaggtatatctcctaatgctatccctcccccatacccccaccccaccccaccccaccccaccacaggccgtatgcagccataaaaaaggatgagttcatgtcctttgtagggacatggatgaagctggaaaccatcattctcagcaaactatcgcaaggataaaaaaccaaacaccgcatgttctcactcataggtgggaattgaacaatgagaacacatggacacaggaagggggaacatctgtaaaatctaaaaataatttagtttcaaaagataactttaaaaatgtctaaatgctagtggtaaaaattaaatatgtagatgatttattaaacattttaaaaacctcatgaaaaagggaatgtgcgacaaaagactaatttgcagctatcaaaaaataggaacagaaaaaatgtgctagcatattaatataaatattaggtgtcattgtgtgtccgagcaacattgttatcagttcccatctagtaatgactctctgtgtgtgtgcagtaaaatcaataataaaggggatgaataggacgactttcatttgaaactaaatctcttggaattgtgtgagctactgtgccacctatcagtggaatgatgaaataattcatacatgaacaattagcttaaataatcagcttaatttagtcaaatttattacaggcaccagtttacaaaaataattggtgcccaagatatttaatacttgggaataccagaattagagtatatcggagacaaagtgaaatctggatactcaatatgatacgacttttttgtttaaacctgcatatttaaactctcctttggtagttggatgctggctccccaaggatactcatgtcgaaatccctagaacctgtgagtatagtacatgatacatgacacaggggaattaaggttgttaattagctgatcttaaaatagggagggagattaacctggattacctgagtgcacactatgtagtcaccggaatgcttaaaaatgaaagaggcacaagagtaggcctgagtgatataatttgagaaagactatacctactgttgttcgctttgaagaatggaggaagaccaggggttaaggaatattggaggtctataaaagctagaaaagggaaagaaacatgatctcttctagaatttccagaaaggaacaaagccctgctgttgcttgagtttagtctaataagactcatgtcagatgtctaacctactcagctgtaagataaaacatttgtcttgttttaagccattaagattttgggaatatgttacaacagtaattgaatactactgcactctctgtagttttttttctgttcagtttcttagctctggtctgttgtacttggctgttcagctttggggcctgacaaactgccctcaatggtagaagtccagcagtgctcatttctatagggttcgggacttgaatcacaaaaggcacgaagggaaaaactttttccctcaccctagacgaaagtccatattttttttttttttttttgcgaggatctgacattttaaaagatgtttagcagtagaaatccctactgttttcagggaatattatcctctacgcttcttacctggcacagtcatgggacaattacatcaacacacaatactttgtcctatatattctgtattatttttaattaacagcatcaactgacaaatctatgttgaaccatatgaagcccaggtctcacctacagtctcttttccagtaatattcagacatatatcagttttttagaattcttgctgggattgcttcttgtatggttaaatgaatgtgctcatgtgcatgggtatataattatgtgcatgcacacatggacgtgcgcacactgctggacatccaaaattgagcagcgatgtgcacagggcataagaatgtatacttgatacttaaaaggatttctaaaatttttacacagtaactgttgccatccttaagatagctctttccttaagtatgcaaaaacagttgggctgtttcaaatgcttatggaagcatctgaaatttccttgcagaagaatgtctttgttttaaatttacatgtctaaataccaattggaaaggtaaagatttgctcaatagaaaggagtaatctgttaaaagtttaaaaaataccgatttcttttggaaaactgcgaagtcctgaattcagaggtcttattcttgtttattctaatcaccccatctgaaggaagcataactttccccaatgactgaaataataacagtaagaatgagaatacatggaaaatgatattaaattcttaccataaacaatcttaaaatttttgctttgaggttaagttttctgagaaattccatacttgcttaaaatatgtttttacaaagtaataactgccattattatttacaacacattaagtactatcctagttatttcaattgcatcctcccattaatttcctagcttggtaggattccccccccaaccagaaaccaaacttaaaaactaggaacttccagtccagtctgtatccctagatgtaagattctgacctggataaattgataatgctgcgaaacaaagtgacctagaaatccagctaatcttatcagtgctcgtttttaattgagaaaatctaattactcagataattgtggagcgtgttgcatactcttaattactgtaaaaacaaaaaaaaaagacaaatttatgctgctatataggcctcacgccctataaaactggatatacttttttatgacccatttagcttcattcattttatcagtgcatagaatgcagtatgttttccttatttcatactattttgttttactttttgtaaccataaaacatcagctttcatgcacaagcatatttttggttggatgagtttgtttaattaattaagcatttgagaacatcagtggtttagttttgaggtgtcacaaatagaaaaacttagggaaaatttctcattgtattggaaacaatttattctgcattaataagttgatataatttggctctgtgtcccctacccaagtctcatctcaaattgtaatccccacgtgtagagggagggtcctggtgggaggtgattggatcagggaggcggttgtccccatgctcttcttgtgatagtgtgtgaatgctcatgtgatctgatggtttaaaagtatttgacagccttccccccgaccccactgccctgtgaagaaggtacttgcttccccttcaccttccaccatgattgtaagtttcctgggggcctccccacccatgtagaactgtgagtctattaatcctcttttacttataaattacccaaccacaggtactctttataacagtgtgaaaacagactaaaacagaaaattggtgcccagatagtggggcattgctataaatatagcaattatagaagtgactttggaactgggtaactggcagaggttggaacaatttggggggggggtcagaagaagacagaaagatgagggagagtttggaatttcccagagacttgttgaatggctttgaccacaatgttgatagtgatacggacaatgaagtccaggctgagatagtctcagatggagatgaggaacttgttgggaactggagtaaaagtgactcttgctatgctttagcaaagagattggtggcattttgccccttccctagacatctgtggaactttgaacttgagagatgatttagggtatctggcagaaatctgtaagcagcaaggcattcaagatgtgacttgactttttctgaaaacatacggttatatgcgttcacagagagattatctgaaatgggaacttttctttaaaaggaaagcagagcataaaagtttggaaaatttgcagcctgtccatgcggcagaaaagaaaaacccattttctagggagtaagtcaagcctgctgcagaaatttgcataagtaaagagaagcagaatgttagtagccaagacaatggggaaaacgtcttcagggtatgtcagagacctttgtgccagccccttccatcacaggcccagaggcctagaagggaaaaatggtttggtgggccaggcccaaggccccactgctctgtgcagccttgggacctggcttcctgtgtcctagctgcttcagctccagccttggctaaaaggggccaaggtacatcttgcaccattgcttcagagggtgcaagccccaagccttggcagcttccatgtggtgttctgcctacggctgtgcagaaggcaagaaatgaggtttgggaacctctgcctagatgtctagaggatgtatggaaacacctggatgttcaggtagaagtctgctgcaggggcggagtcctcatggagaacctctactagggcaatgcaggggggaaatgtggggttggagcccttccccccaccacagagtcctcactggggcactgcctagtggagccatgagaagaggcccaccatctagaccccagaatggtagatccactgacaacttgcaccatgcacttagaaaagctgcaggcactgtgaaagccatgggggctgtgctctgcagagccacaggcgtggagctgtccaaggtcatgggagcccaccccttgcatcagcctgccctggatatgagacatggagtcaaggcagatttgggagctttaagatttaacgattgcctggctgcatttcaaacttgcgtgggacctgtgtctactttgctttgaccagtttcccccatttagaatggaaacatttacccaatacttatacctgcattgtaccttggaagtaactagcttgcttttggttttacaggcttgtaggcagagagaacttgccttgtctcagatgaaactttggacttggaattttgacttaatgccgaaatgagttaagactttgcgagactgttgggaaggcatgactgtgttttgaaatgtgatgacatgaggcttgggaggggccgggagcagaatgatatggtttggctatgtgtacccacccaaattttgtctcaaattgtaatccccacgtgtcaagggagggaactggtgggatattggatcatttgggggatgggggatgggtggttcccctatgctgcactcatgatagttctcacaagttctgatggtttaagtgtctggctgttccctgccccctcctgccacctagtgaagagagtgcttgcttcccctttgcctttcaccatgattttaactttcctgaggcttccccagccatgcggaactgtgaatcaattaaacctctttctttctaaattacccagtctcaggtattccttatggcagtgtgaaaatggactaatacataagtatactaagtgatagaactacctagaaagaataaatccagattaacttaagatgctcttggaatcagtgtttcagtgtaattgactgtggacttaaacagctttaatggagaagttgcatcttacgaattgtttctttccctccggtcttagtcccattacttgaaagaaggggtacttggtaaatgttgattacgttattaaaaatattttaacttatttttagtaaaattgaataactctcttatattacaatcgtggaacccttgccctttagcaggccatttctcctaaggaatttcagacatccctaatcttaacatctttatataatgtacatactgttgtgcgagtgtatctttctaggggcccatttatcttaaaccgactttcctatgttcctatcatttaatgtgtttttccattggtaatgatatatttcttctgttccaggatgggccagatatcagatatcacacattgcaagtgtaaactaaagcccagagcagaaattcaaatggaattaaagtataaataaaaatataggtcagacagaatatggataggttgtaggaatagatcagatgccagatgtagattttaaaaaacatgttcagaaaatatagtattgaaaactaagaaagagcactccagaggagctttaaaaaaggagagcgagagaaagaaaaataatagaaaataaaactggaggacattgttaagtgaaatcaaccaggcacagagacacaaatattgcaagttctcactcatatgtgggagctaaagtaaattgaactcatggagatagagagtgggatgatggttaccagatgctgagaagggtaagtggggaggacaggataaggagggagtggtaaataggtaaaaaaaaaaaaaaaaataaaaagtatatagttagatagaaggaatcagatctagtgtttggtagcaccctagagtgattatagttaccaataatttatatttcaaaataatagttaaattggaatttagctaacataaatgataaatgcttgaggtgatggatgccctaatttccctgatttatcattacatgttgtattcatgtatcaaaatatcccatgcaccccaaatgtacaactattatgtagtcataataactaaaataattaacgaaaatgaacctcatctaataattggacatttctctcgctagctataaataccaggctttcagtcagctctacttttagtttatgaatgaataccatagaaacacctgtaatgtcctccagtcaaaggtgttgatcacccaaagctgagcttgttaaatttacagggaaagggtaagcaccaccttcagggaatagtcatagcctctcagaagaggagcatgacggaaggatacttaagagttttacacgctgagctggatggttctaagtatgctctcgacagattggtcagaattagcttaccagatgagttgctgtgacagtctgtggtgttatcttggaacacatgagtttgcccgagtttctgtaaatctacttgagcttaaacaatttgatatgtttattttccccaaacgattttatgttagccatcacgggtaattatgcttggcataagggactcttgcttgatataggggggagtctgttgtatccgagttcttagatcatcctatattacatcctatattaactctttaggatacagggattgattagggagtgatatattagttcacttacatagggagaaatgatcaactcagaatatttttgtccctttaaaacgtctacctctatgtaagagtaaagagcataggctcttgagctgcactgtctttgaatcctagctctgctacctaccagatgtgtgaccttaaaaactttacacaagcaattagttcgtcagtttcctcatttgtgcaatgtggttaataataaatgggttaatgtatgttaaatacttcatatagtacagagtaaagactagttattgtaactcatgctattgctgatttttaaatgatgtttattttaattcaattgctgttcccccttgtaaacgtagaaagaaaaggttaggaaagggagatgtagaattctactaacaatgacttatattagtagttgggccaataggccctccaaaggagattcatcttgtgggatgtaagtgcatatagtagaatatgtcatgaattaataacggcattcaaaaatgaagcaaagacctgtttaaatgacctcagggagaaatcagaaacttttacagcagtatctgctttaggaaatagctagtgatttaccatttcaaattatgaatggccaaccaatgccctcatcagttaggcattgacagcccattcttctagttctatcttcttctgtaccggtttcaggtgtttccttctattactccttgaattggctatggcatagtcagagtatcaaaatcactggcttagttaggacctcctagtgctctatataaatatattggtatttttatctttttgacttggaatggtttcatttaacatgtaagatacttagatgttgagcccatccttgagaagaataatgtataaacctcaaagataaaacaaaatcctctcattcttgatcagtgcttttagtttgagcatgtcacttggattactgtgtctctggctctagcattaaaatagtcaacctctgaaatagcaaaagtggtacagaaactcgtatattttggagagtcatcacagggaatactatttagttatatttaaccaattgttgttatgcatctttcaggggtgagacactgaaaatattgcaaagacataatcacagcccttgatataatagtagtttgaaaaaagccgtattggggcacagaaggagtagtggcagagtgtgtgtgtgtgtgtgtgtgtattaacaaaatgggattagggaatttgtcaatgatgagatgacatttatgttttcacttgctgaaaactttagaaatctacttagtttgctaggtttgtagtggcttctgttttcatctgtagtagttacaccttaagtgtgacaaactttcatttacttaatcagtttcagtctttctaaggctggcatgatcactaaatgagaatagactcatcttaattttcacatggcttcaaaattatagaaatattaatccttccaaaaaatgtttagatgtagtccaaaagatttgtctgtggtctctgaaaagtgtttcactggagataaagctaatccagtttaaagtaactttgtaatcaaaattaatattgcatgcgctaatcataggctctccatgccttcacttctagtcagatccaggctcattgggagtcaagtgccagagaggtcctgcctcaggacctttgtacttgctgatcctttaatatggaaatgtgttttctccagagagtcatcacaggattcaactgcttatttcattcaactctatttttaaatgttcctgtagttgaaaggctttccctctctaaatcctctcttaagtagagccaacctctccatgccttttgttccctctctttaccttgctctatttttctttataggacttgccatgacctgattttgtgtagcatatttatttgtccttatttttatttctagtcctagaatttaagcttcataagttaaggactttgtacattttattcactgctatatctcctggtcctaaaacagtaggaacttaaatgtttaatgaaaaacataaatgaatgattaaattactaatagaatctgtattccctctccaaatgtacatttggtattgtactaatgtatataattttatgcaactcataaagtaatcgacatatttatattgctttcaaaattagcgccctcaaatacatttaggttagaaaaactaaaattaatacatcaattgatcatcaagcatagaaaaggaactccaagaacacgtaaacattttacatctaaggtcttactatacttttggtattaatgtatattgtattaaatcattgtaaatgtagttttctattccgaatagcaatactagaggaatttactttaaattctacattctctgctggatgatcccccaaaactgctgcccagataattacagttccctctcttagcttgtcttccagtctctaatttcctcctactttaaatcattgttcacatgccaccacaattagtgtttgaagatgacaggtctaagcatgtcattctcttgttaatacaaccccatgttctttctaaacaaaatccggctttctatgcctgccttttattgcttcccaccatgtgttctgtacccattcttaaactaaccttcagttacaccaaccttgggaatacatgttcctgaaccacaaaagggtttcctccatgtttttatcttacagaagtcacttaccttagtacttcatgcatagtctgtactaagtaagggtttattggtgatgactatgtgttcaatcttttaaaaactttgccactgtcctagaacttaaagatgactattccatgaagctggtttatatttcaaagataaaatgtcatatttattataagcctcctgtttttttttttttctggtttttcctggatagtaatgtttactcaatttactaataaaactagaatatatcacttggctataagctgtagtaccacagaatttgaggtgacacagaaaaattattcatctgctcttatatctttccaagggcatgattagtcttgatggcctggtgcaactgaattctattaattcttatttaaatcatcagaaacaaagtgtgatctcgtgtcactgaattagctaaacaaccttgctgctttaacacataagtgccaaaatagaaaggagcttaaaacaatagtttatatgtagcccaggtataagtccaatgtaggtgttccttattggtgactgatatggtttggctgtgtccccacccaaattgcatcttgaattcccacgtgttctgggagtggcccagtgggaggtaattgaatcatgggggcaggtctttcccgtgctgttttcttgatagtggtaagtctcgtgagatctgatggcttcataagggggagactccttgcacaagttaccttctcgtctgccaccatgtgagacatgcctttcgcattctgccatgattgtgaggccaccccagccacgtggaaccgtaaatgaattaaacgtctttcttttgtaaatcgtccagtctcggcaggtatttatcagcagtgtgaaaatggactaattacagtgactaatatttttctatatttttctgcctttgttgtggctctaccttcttcacagatgatgatgttttttgtttttttgttttttcatatagccattgaagagggggaagcaaatacagaaaagccacagtgacttcttagaagccttgtggtagaggtgatgcatatgtgctcccttcactttccacatgaaggggatgtgtgctcatgaaacatgtatatagccatgcctgtctacaaggataatgcagtggctggctgagtggctgcttctaagtgaaaaatctatactttaaaagctggagaaaggacatggttgtttgacagcctgtctctgccatagttaggaactatcagcttcataaataaaactatctggtggtcttctcaatggggagcttaattacctcaagtcaataagaggaaaatatccattagattcaattctatgttaagaaaatcgtggtcccagtgggattataatttctaaaatgaaggaatgtcagtaaatttaatggaaccttaagtataccatagaaaaaaatgatacattctgacattgaattttgttgatttaaataaatttattgtggtaaccatgctggttcccttcatgacatatgaatggggaattaaataatatacacaatgctttgctgaaaagtgttcaatttgtgttagatcagatacacttgtcttggtgacaaaattggcacaaagctttatgaaacccacgagtgggcaaagattgtatcagaaatatctaacggtataaagcaattttgtttttcattgttacgatattgacacatctccaagaaacacatccagggatgaatagctctattccccaaattctaaagacagcatctgacggaaatctaatttcagtcttgttattaaataagttttcttagtgtctgccatagtagacagtgtttgcaagatagcatattcattttttaacatatttttcttttgtgtgttataaataaaattaataaactgtcatattctactggtatccactgacgtttcttagttttactttaatctcaccattatgtaaattgactttgacagaatatttttagttgaaacattgctggaaattgaataaagttatgtgtgtgtgtaactcctgtgaaacactcaatgttatatctatatctcttatcaatagttaagcctttatgaaaataattgattctttagcatggtgtattgcacctttctcccaaacagagatttacagacacatagtagggtgtgtatatatatagatgagcatcaggtataacacataaatgcttatatatctaattggtgttgaggtctgaattaatgtatttttgaaagcatcggttcttgtgacagtagaatcaaatacttgcataatgttttatagactagttataatccttacaaaaatcctattgacaaaatagcattagcttaatattccagatgagaaaatgggctccaagtaattagatgctttgttcctgatcaaacactaagtggaaaaaaacccacctcattacaaaattttcttgttgaaagacttcagactgcctctaaaatagaggagagaagaaatagtctgacactctaaattggatataaacgtcagaattgggactataagtctagaaaaagtaagtatgtttaatggcacatatagaacttacagtcttaacaaatgaagctttttggtcaattttggagtatgatcttctataacacggaaaatcattttggggttttttttcctgaataattcataaatggagatggactaaagaaaatataaaggaaatagcataggaaaattttgtaaaaacttatttggatattttatgatttttctacatctgttttctaaattttacaccagggttccctttaaatggctacttttttggaaaagaaatctgagtatatacccatatgcaaatgagcctcaaaaaatactaggtgcctttagcttctgttaatatgaaattactaattcatgatgagaatattttattttaatgttagcggtgttgcttttggttggaagccaggtaaatgtaatcctattactatgcctataatgcggagtagttttgtttaatggtatgtattaatgcggcattggacagcttgaattgaatcagagaaatggtgttggcaagcattaaagactttaagagaatgcaaattttatatgcctctttttattgtaaattgacaatatataattgtataaatatatggcatacaaagtgatggtagaatttatgaatacaatgtggagtaattaaatcaagctagttaacatatctatcacctcaaagacttttgtggagagaacatttgaagtgtactctcttagcagcttcgaaatgagcaatactctattaactatattcatgctgtgcaatgcatttcaaattttcatcagaaaaatcagctttgaaagagtgtatgcaaaaattttataagcttctcagatgatatgatcttatatgtagaaaattctagagatttccacacaaaaaacctgctagaactaataaattaagcacaattgcagtaaataaaatcaatatacagaaataagttatattttatgcactaacagtgatgcagtccaaaaaggagattaaggaaacaattttatttaaaatagtaacaaaaagagtaaaatacttaggaattaaccaagaaggtggaagacttatacactgacaactacaaaacaatcctgaaagaaattaaacatttatttttataaataaatgaaaaggaaccccaggtttatgaaatggaacactcaatattgttgttgaggtatccgagttactcaaaacaaactacacattcagtgccatctctaagaaaatcccaattagtttttctgcagaaatagacaactctatcaaaaattcccatgtaatctcatggatccaggaatagttgaaacgatcttgaaaaaagaatgaagttgaagggtcatacgtcctgatttcaaaacttactacaaagctaccataatcaaaacactgtggtattggcttaaaaaaagggaatgtagaacaatagaatataatagccctgaagtaaactctactatatattgtcaaacaattttccataaggttgccaaggttttttaatgattttttaatgaagccacaaatgttgctaagaaactgaatatatacatttaaaataaatgaagttggactcttataaaatacacaaaaattaagtcaaaatggatcaggaagtaaacgtggccaaaagtacagaacttttagaagaaagcgtagacatttggaagaaaacataaacattagattgggcaattaaatatcttggatatgacactaaaagctcaggctacaacagaaaaattaggtaaattgaaatgcatcaacattaaaaacttctgtgcatgaatgaacaccatcagagtgaaaaggcaacttacggaatgggagaagatgtttgcgaatcatatattcaatagggaattaatatccagactgtgccaagaactcctatatgttagtccattcttgcattgctctaaagaaatatctgaaactgggtaaattataaagaaaagaggtttaattggctcacatttctgtaggctgtacaggaagcatgatgctggcatctgctcggcttctggggaggcctcaggaaacataaagcagaaagggaagggtgacctggcaggtcatatggtcagaacaggagcaagaggggtggagggagatgtcatacacttttaaacgaccagatttcataagaactctctatcacgagaatagtaccaagcggacagtactaaaccattcatcagaaatttgccccagtgatccaatcacctcccaccagacaccaactccaacattggggattacaattcaacatgagatttgagtggggacacagttaaattatatcatcgtagaattcaacaacagaaaaacagcaattaaaaaaatgaataaatgagttgatcagaaatttctctaaagtttggccagtaagaccatgagtagataatcgatatcgctgatcattagggaaatgcagataaatcccaaatgagatagcacttcacacccattaggatgatgattattttaaaacaccaaaaaaaaaaaaaaaaacccagaaaataaatatggttgaggatgtggaaaaatttgaacacttgtgaactgctggagggaatgtaaaaccttgcagtcactgtggaaacaaatatgttggtttctcaaaatatagaacgtagaattaccatgtgatccagcaattccacttctgggaatatactcaaaagaattgaaaaaaggaccttcaaaatatatttgtacacccatgtttatagcagcattattcatagtagcaaaagatggagcaactcaaatgtccatctgaagatgaatggataaacaaaatgtggtaaatgtatacagtagaatattattcagccttaagaaagttctgacacacattatagcatggatgaatcttgatgatgatatgctaaggggaaaaagccagatacaaaaggataacatatgattctatttgtatgagctatctagagcagtaaaatgcatagataaagtagaatggtggcctctagaagctgggggagagaaggtatggggagttatttaatggatatgaagttttttgggggaagataatttttggaggtggatggtggggatggtgacacaacaaggtaaatatacttaatgctgataaattgtatgcttataaatgattagaattatatgttttatgttatatatattttaccatgataaaaacctataagctttcttgtaaagttttagaaaatgtttggattcataagtgttggatgattgagttttatagtgtaaatttaatgtagttgtgctcaattgtcaattgtatgcctattgtctgtgagtatatattttccagattgttctctaaacataatttttaaccatttagttggaaaaaaaaaaaacctcaacttaaacccaaatggaattatgtagtccattcagtgcatactgtgaaatatattagtaacattttattcattttaaagattttcgttatcagtttaggaagaatgataattttataaatccatagcatactgttgttgtgtgcgggtaatactcattatttaggctgtttttaatttggggtcttttttaacagataatcaacaaacgttttttatttgcacacagtactcttagtatttcgttttgcttcagtaatagtaaatgaggctggggtttggagagcacgattgcttttggaaaagtcaatagagacatgtttttatcgctactgctttttttctatgttaattggaatttgacgtaaaattgattctgaaagatatcaaggtagacacttgaaatatagattggacaataaggttggtagaccattactgtgctttgaactagagtcattaatgtgattgtgaaaatttttactttgtatgttattcatcacttttctcccttagtggtgtttagagcatgatgagttgttactgtactgacaagtattagtctagtagtaatttctcataggctgacaagtgccaaaattcatcctcacatatgaatacactaaagcagacaaacactgttttcatctctgacactatctacagtttatcgtgatacattattttggcctacagggtcacaggcaaattatatttaatcactgctttaaactaaaacataactataaatatttttgcactctttaaatcagcataacaatccaatagacttcaagatcctgagataatatttaataacattaaaatgatttaaaagtataacgattgtattaaataattctgaataaacaatacttttgaatgaagaagattaattagcatgatcattatagaaatggtcctattaatacaaagatgtcaagagtcatttctggttcaagtcaattaagctacgttttaattgaaaaaagctgttcattgtgtacagcggtagcactcctgacatatcatataaatgaccccattaatgcaggagaaataaggtcaactgagacatttttactgaaaccaattatgttacattttaattgaaaaataaaagctgcttttattcaaaggaagcaccactgacactccatcatattccatagcctcctaatattgcagtaacttcctaagcagtctctcagttcttcgcattatacaaagttatctttttactacattaattaggtcatgtgttccctatttaacaccttctgaagactctacattgtacttagaaaaatgtctggagtctgaaagcagccagcaagaccctgtgtgatctgtcccctgcttgcttcttgatctcacttcacactggttcccttacttcaccaggctccggtcaagcaagaacatacttcttctccctctttatatagctgacaacttcctgccattcagtctgagccgaaaggtctcatcttcagaagaatcctttgcagtctaccatatgtaaaagagctctcctgatgagccctcccagccattcctgtatcctattcacacttcttgctttaaaatcatcatcattatctgaaattaccttgtttgattatctagcttatttcttctctgcttcccctactagaatgtttggtgtcaaggactttgtccgttggcttcagtactgtatagccagtagctaggagaatgccgaagagatggtaggtgaaaaatgtttgtggaatggataaataaatgaatagcaatagtacagaagtatgccatcttatttgttaataggtgaccatcggttgatagagtttcatttctcctgattgcttaactcagtaacactctcctgcaggagagctagtcaggactcagggtttttttgttttttttgattttttttttctttttttttctttttttgagacagagtcttgctctgtcacctagactggagtgcagtggtacgatctggcctcactgcaacctctgcctcctaggttcaaatgattcctcctgtctcagcctcccgagtagctgggattacaggcgcgtgcaactatgcctggctaattttttgtgtttttagtagagactgggtttcactgtgttagccagaatggtctcgatctccttaccttgtgatctgcccatctcggcctcccaaagtgctgggataacaagcatgagccaccatgcccagcccgaggactcaggtttaagtatgtgaacagatagttcagaagacgttataaactgttaatggaaagtctggaaggaacccagagatatgttttgtttgatctacaccttactacagatttgggtttctgttagcagatctagcagctctggggcaacattctgcaatggcaccatcctggtagtactgaggagtgctactctcctccctcaaagcgggcacattactgttcagtctggagctgcactcgccatacacacagtttatgtaactccactgacagactctgccactccagtcatttatggcatctgactttgattccacatggaaatctactgggtggacctgtcacatttaaagataatcatcatcatcattgtgtatgtgtgtgtataagttacattggccatttttctggggactgagtctgtctactccaaaagctgtgaaaatagtaatgattaaaagtcctcagactctatgattgtggaaattctttgtattctagaagcacacaattctaagacttctgagtgtctctcttcagtctcctgtgaagagcatcaccgatttatcactaaatgagcagattatatactggggatttagtgtagaatgtgccatacagtagctgtgcttcttgaagaaatccctggataggccaggtgggtttatggtaagagataaaattaaatagacgctgcaaaaaaaggagacaacattattaaagtcacaggaacaaatgacacttgtaaacatcttggacatgagttgataacatttaagtgtagtccaaagagttcaaataaaaaggcattgcaatcacttgagagagagagagaaataatgcccggagagtacatttgggctatattttagagaaaggccttgataggtagaaatagggaagaatagcattccaggtgaaatagcaaggcaaaagcaccaatgaagaagaaataagaggaaggcatattcaaggtatagaaaatcatgtcattatgtgaggtacaaaaagctatcgagtgtgcatttatatatgaggtatcatgctaggaacccaggatagctagatcaaaaggtatgcattaaagacattttgactaatttccaaatgatcataatgatgcctatatgcaacatcaatatatgaagtattcagtttcccattccttgcaagtaaacctgaatatgtttaacattatatcactctgttcttccctcctgcaaccataattcataagttattttcaccaattcattcaccaagcatttattgaacactatgtatcatgtctctgattggcactggggaaacaaatgtctctaatctcaagggacatacagtagaatgggagagagatacagttcctttaaattctggacctttccatttctcttctattttcaatagagcttgcagtcatggaaaatttattctctgtggcaacaaagtagggcagatatttgccctggaaggtgaagagagatagagaaggctttctgcctaacatttatcatgaggtactaacaaatatgacaattgaataatgctgttaaatactatgtggcatactgattccatttcacatacttatgtctcctctttttaatagaaggtagtgtaaaaagaagtcctgtgttacagtaatgtttcttttattatctaattgatccttgggtacgttacctaataattgggtatgtacatctccacatacatagcagtggaatagtaatagttggggggatttttgtgacatttaagaagaataattacaagagtcaaaagtataatataaacacaaaataggaactttccatttttcaatgcagatttattcagcatctttgcttctgattccatgtatttttctgcttcagaattctttttttatcctctatcttattttacagttaataatttcctgagggactactttctgagtggaaaattgttagaatcctgaagaaatgtatcacatgggcctgcctgggtcttcccccgccccccccccccccccaagaaaaacctgcatctgccttaaacataagatccagtagtcagtatgaaattcatcaagctaaagcttatctcgtctgtagttgtagctctctgaaactttaaaaaaggagttttaaactttgcatatctgaatttctgaggtagcattatatatgaaaccaaaaatatataaaataataagaaaattgctaaagaatcactttgtgaaatgatgaatccatttagcttagttcttctgtttggatatgatagccttattgccatagagaaattgaggtaaggcattaagagaacaagcaaacaattttgcagtaactaactcatctctcccatgttgccaggtgtgccgcatattgctgagcagtgaaaggattaagctaggaaagaaagtggggaaagtgctacctggaaatcagaatgaacattgaatatagaaatgcatctaagggggaatgagaaagagaagagtaaattaggtttttcttgagtcctgtctttgttacttccacattttgtctacaggattaagcattcagtgcctgataagtttagtattgtgccagaggaccccagagaaaaattagaaatgatcctttccttctagcaactttcagtgtaacttgagagtcaggactgaccaaaatagttcaataggtctgaagtaaaattatttgtgaagtagtaaatttcactttatagtgtatgaatgctgtagaaatatatgagagaaatcaacaagggctgtgatggaaaataggaaacatccagaagtagaagttgagctgaaacttaaagatagttagaattggataagataaaatgagtattcccagttgcaaaacaatgtgagagcatgtttcgaaatagagaagagggatgggcataggaaaaacatacagatgaagtaaaagagggcattttatcttttttatttttttcattttacatgtctgttttgtttgtggacgcctatttggtctcattgttctggctttgggagacaggcaggggatgctgcggagcacatggcccctatttgtggtcgttttgctccaggtgaaaataatagccaccctttattgaacacatcctgtgtttcaggcactgtgctaagctcttacactttgttatctcgtaatcttgagaatacctgtgtgagggcaaattgcagtaagagtaaatggggggtttgattccgaagtctgagattcttgcctttatgaccactgacagttaaggggcttgttacataattacaggaactcaagagtcttggtcgttgaataacaatggatcaagtgctgtgctgtgacccattattttatcaagtggatggaataaaacatgactactgtgttcatttggatgagtaggagaatgctgaactttgaaaggttatggaaggcaagcctgtagagaggtaccaaaatggcatgtagcaacacgcagggaggagaaagacctggatttaaatgcagtctctgccatctagagctgcgtgagcttgagaagtctgcatcatcttccctctctggcccctaaagctaaagaattaaaatgtatcaccactgctctctaagagttcagtttaagtgacagcaatagtcaagagtgtcagtttgagttttcccccaaagcaaagcctgacagaaagccatgattggctgattatcaaagaaactagtaagaaaactcaggaacatgtgggacctggaaaagtgagacaaggaagaaggaaaagctaataaagataacattgttgaactgatgaccataataggtaactgtacctcaaccttgcctgggacattatagaaccttatagaactgtcctcagaaatgtccctttgaaggacaatttattttcctccctcctcttcctcctcctcctcctgttgctagagctaggaagtgaaagggtgttaaccctctaacagcagaaacaggaactgcagcaaaaatgagagatgggttgatgggatacagtgcaaaatacaaagaggcatctactgttcaaaataaacctataaaggaatctgtattagtctgttctcatgctgctaataaaggcgtaccaaagactaggtaatttataaaggaaaggtttaattgactcatagttctacatggctggggaggcctcacaatcatggtggagggcaaatgagcagcaaagtcacatcttccatggagacaggcaagaagagaaagcatgttccgggaaactttcttgtataaaaccatcagatctcgtgagacgtattcactatcacgagaacagcatgggaaagacctgccgccatgattcagttacctcctaccaggtccctcccatgacatggtgggaattacgggagctacaattcaagatttgggggaagaaacaaccaaaccatatcagaatcgaaagaaaaattataaagtcaaagtagaggaaattctggagagccttgaaagttgggctaaaactagatagaatgtgtatgtctcaacattttctattatatccctgaatcatataacttgttaagaatggggttacacaaaatttcagttaggttggagagggaaattcaagagaactgttgggtgtatataacaagactatagttaatagcaatgtattgtatgcttgaaaatttcaaaaagaatagactttaaatgttctcacaagcatgtgaggtaatggatatatcaattggcttgattgagccatttttaaatgtatatgcctatcaagatatattgtatactataaatatataaaatttgtcatgttaagtaaattcgaaattagaaaaaaaatggagctaatctctttaagagttaaaccctgaattgtagggaatttcttgctgacgaagactaatttggtcttgaagagaatttcatgtcaccatgaacttatggcctgacttcaaaccagtgatgagctgtggagggatatagggcactttgctttccatcagatcctctcttaagctgttttgcatcacttaattctaactgtaaagttgggaaaatgtagatggggcaagtgacagcatatggtttgatatatacttgattgtatccataagaacatcctcttacctttttaataagtagcttggagtgcttcctgccaaggctttcaccagttatccagaagattaaaggctgaagtagtgattgtccttggaatgtccctctatctatgtgtagatctgtggttttattcatttgtttcccaaattgatccacaaggagattaatcttgtatttttttcctgatgacttttataaactagatgcgtaagacatataatattgacatcatatcaagttgcccatagggttatttaaatatttgaagagatgtgtttgttctcttacactctctgaatgcttttggtttttagcgattttattgtcatcaaaaaccatattcgactacacatttttctgacctactagacattcacatttagctttgggtactttgtcattgtagaagcaagtataaagtaatgaaatttatgattcaatcagaaaacaagtattgaagctgctgaaatatgacgttctcagctttatttcttctacgaaaagtccaggttaatgtttataaaatatttttaaacttttttgtctgttcaggactgaatttcttgttgagccggaatggtgagataattctttcttctgtggaacaaatgcattttaatgatagttacttatatgaaaatgttactaagatttaatttatgcgcttaatgctgcttaaaataaatgtattcaataacaaaacaaagccaatagccatagcacattaattattgaatagactttctgtagttactgcaactgaatgacaggtagtaagaccttaatatttgcaatcacaattgtattcttctttgccctagattaagcttgctgattacagtgcaatgaagaaaaattaattagtttgctccagtggagcagttaatatagcacaagcgaaacccataccctgcttcctcctgtaaccaacttgttttcacttactctgccttttgatacacaaccattttcttgatcacttcccaattgaggaaaagtttaattaagtagctaatactatttagaaaatatagtgctaaggaaaaaacatgttattaaattcaaaccattgatatttttattgctatttaacttatattttatacctggcaagcaaataattgaatattgtttgaaaatatttgtaattaagaactcaagaatatgaaaacatcattgagttataaaacatgtattactcctcaaagagcaaatattcctgtgttgggctgctcttagttggagtaaacacattacctgcccacagggaacttttcatctattagaattcagaatacatttcagggattcttaccaaaaagatttagaatacagctatatgaatttatagaaatattttaacttcagaaggattgtgtgctcacttccgtatcttcctttaagattttagtcatgttccgttttttgtgttttttttccttgtctgaagacaatatttttagaggagagaatttctttgaaattgatactgtaagtaaatttactgtatttacttagaactactcattcacccatacaaaaaaaaagttgagctttcattattgagctctcctcattatgttataaaggaaaaagacattgtccttatcatgggagacaagcagatacatgggcaattcttcagcaatgtgatgagtagggaaagacatacatgatgtgggaaatagtgttttacagtcaggtcatgcattgaaccaaaactcaggccgtaaggaaaggctttgaaggggcagtggtaacttacctgacatgtaaaggagccagatgaaaaggatgttgcaggcagagaagctgtaatgtacagagaactgaaggtaaaataaaatatcagcttatggcttggcaaacactatggggaaagaggcacagaagtcacaatgatagtgggagccatctgcacaatgatttaatggctagggtgttatgtacagttatgtgtcttgtatattgcatcatttctataacagtataaatgctattgagtataaattagatatttattgacctcatattttacagatttgccgtgaaaatttctgtatgtttaaatctgcgataagtttgttattgactcattcatctaaattaatagcttgttcttcagaaaagaagttttgagactggttgtgatggtctcatcaggttgaagagatcatacttttactgtggcacctattttttttttttaatggtttatttctatttgagtaaaacagtggctaaggttctatggtatcgggataagatggtgataagtgatctatatgacagagttggcagaggaattaataaccatattgacttgggagagtgagctctgtatatagaatacacattttagtcaggagggcagagtggtaaaagtctgagatcttgagatgcactgcttgggtttgaatcctagctgtattacttaaaagctgtgtggccctcagaaagttagtcatactgtgtttcagtttcctcatctgtaaaatggcgataattgtatccatctgataagattgttttgaaaatatttaagtttaacatgtatgtatgtagttacatacatgtaaaagtatttaaaaaggtgcttggtagatattaagtgaccagcaactctaaatattgttttattataattagtaagctaccacaggttctgtgctgctgaataattgatcaataccttacataacatcagcaaaggggtaattttcaattttgcagatggcacaaatctgggtggggggtcaaaatgaagatgagaatttttcatgataggctaaatcacggggtcaaaacccacaaaatagaattgagcagggtttggtaccttcttaattgcttgcttgctttattttcaatggcttgttatgtaacaccaaccatgtggtcaacttgctaggttatataaaggtgaataaggctcggttccttccctcaagaacatattaacatgtagacgcaagtacagaaagggagaactaacattgtattataaatattctaaaaatgctaaattaacagaaatatgatacaaagtatagtataatgtagtatttagaggagataatggtttcacactcctttgctctgacaaagcatcaagagtctttagttatttgtgtcagattttaagaaagccaattaaatgttatagaacacccacagctgagggaagaatttgtactgaagcttggttggagtatactccctgtgtggcttactatgagtggcagtgcagagggtttgtggtggtcaaataggaaatctttatgagtatgaaaaacaaatttctaaggtagactcaatgcaaagtcgaaccacatctggaagaactataaattccataaatgttcattaagcacctcctatgggcaaagtgttctgttaggcctgaatgaatttattgaagacataagaaaaggctcatgtcttggaatatattgtcttttgaggaataccagcataattatgattgtataatagtttaattttatttttgatgtgtactatttaaaattcagagtgctataaaaatagtaaatcagggaatctgtatctggaggaataagaaatgaagtctttttgaaggaagtgatatttagatggaagtctgggtactagcttgttgtggagaaggaagagggtaaaggcatgagggaggaaaatacaggtggggatggaaaggtgttctaagcagggagaagtcagtgcttgtgtattagtccgttttcatgctgctgataaagagatacctgagattgggtaatttatacagcaaaaagggtttaatagacttgcaattctatgtggatggggaagcctcacaatcatggtggaaggcaaggaggagtaagtcacattttacaggaatgacagagggcaaagaaagcttgtgcagggaaactccacttacaaagccatcagatctcgtgagactttcactaccacaagaacagcatgggaaagacctgtccccatgattcaattacctcccacagggatcctctgacaacatgtgggaattcaagatgagatttgggtggggactcagccaaaccatatcattccacccccggcccctcccaaatctcatatcctcacatttgaaaaccaatcttgccttcccaacagtgcaccaaagtctttactcattccctcattaactcaaaactccacagtccaaagtgtcatcctagataaggcaatttccttctgcctgtgagcctataaaatcaaaagcagattagttacttcctagatacagtggggttacaggcattgggtaaatatagcccttccaaataggagaaattgtccaaaacaaaggggcttcagggcacatgcaagtctgaaatccagcagggctgtcaaatcttaaagctccaaaatgatctcctttgactgcgtatctcacatccaggtcatgctgatgcaagagaggggttcacgtggtcttgggccactctgcccctgcggcttttcagggtacagcctccctcctggatgctttcatgagctggcattgattgtggctttcctcggtgtgtgttgcaagctgccagtggatctaccattctggggtctggaggacagtggccctcttttcatggctctaatagacagtgctctagtagggtctctgtgtgagggctctaaccccacatttttcttttgcactgccctagcagaggttctccatgagggccctgcccctacagcaaacttctacctgggcatccaggtttttccatacatcctctgaaatctaggcagaggttcccaaaccgcagttcttgacttctgtgcacctgcgggctcaacacgacgtggaagctgccaaggcttgggcttccgccctctgaagtaacagcccaagctgtacctcggccccttttagtcacagctggagtggctgggacacagggcaccaagtctctaggctgcacaccacagagggaccctgggcctagcccacaaaaccattttttcctcctaaactccagacatgtgatgggaggggctgccacaaaggtctctgacgtgccctggagacatttttctcattgtcttggtgattaacattcagttccttgttacttatacaaatttctgcagtgggcgtgaatttcttctcagaaagtgtgattttcttttttatcacattgtcaggctgtaatttttccaaacttttatgctctgtttcccttttaaaactgaatgccttaacaggacccaagtcacctcacgaatgctttgctgcttagaagtttctcccaccagataacgctaaatcacccctctcaagctcaaagttccctataactctagggcaggagcaaaatgctcccagtctctttgctaaaatataatgagtcacttttgttcgggctcccaacaagttgctcatctctatctgagaccatctcagcttggatttcattctctacatcattatcagcatcttggtcaaagctattcaagtctctaggaagtcccaaactttcccacattttcctgtcttctgagctctcaaactgttgcaacctctgcctgttacccagttccaaagttgcttccacattttcacgtgtcttttcagcagcaccccactctactggtaccaattcactgtattaatttgtttttatactgctgataaagtcatgccagagaatggataatttatacaggaaaaagagtttaatggacttagagttccacgtagctagggaagcttcacaatcatgctggaaggcaaggaagagcaagtcacgtcttacatggatggcagcagacagagagcttgtgtggggaaactcccccttacaaagccatcagattttgtgaaacttattcactatcatgagaacagcacgggaaatacctgaccccatgatccagttacctcccactgggtccttcctacaacatgtgggaattcatgatgatatttgggtgagggcacagccaaaccatatcagtaggtataagtaaaataggtgaagggtggagatcaatcagaggaaagcacaccaaataggaggacaagttctcaatccactgcaaggatttgatttgtagtttggctttcaggcctttaactgtcttcagcttggaagtggggtttcactgggtacccacccctatctgcctaggagtttggctctgcttcctgtcactgtcatatgcacttctctgtggtttccaaaacctgacacagggaagaaatacaatacaggtatctgatttatagcaatctgttataaattattgaatgaatatcatattttaaattcatacctgatagatattttgcacatttcttgatttacttctaaaataagtggatttctcttctttccaaatgtaaatcaaatttcgcctaacttcatatgaaacacgggaagtttttctcccttttgtcagaatttttaaatgtatttatattttaatctgaagaaactagctttctcaaggatggatagagtttgaaaatgatagacatgattcagttttctaactctaatgctatgctagttttcatagagtttatgattaacataaatgtagcaatatacatgattttccgttagggaaaaatctctgtttattcttaatgttgtaaatcacaagtcaataaacacttatgagtgtcttctatatatgtagaaatgtactaggtttcatgggtaaaagtgacaaataaggcaaggcgtctgttttttcatccaatggaaatggctcacaatcacatttcaaaaaagatcagtgaactgtatataactacctatgtcttaatatgaacaaattgtgattcattggttcatataacagctgcaattcctaatacctaacatcaaatcttttttgctatgtgtggtgttagccacataaattctcactattgattcaataatgagttttttggcttttaattgtgtgtcatttttttgttgtttacagacatgataattttacgtagttctgccttggtgtctacctcaattatcagagtcttaaagagattatagcaactgggaaccctaaaagccttcagcaaatcttggctttagccaggatcctcaaataatgtccaaacgtgttaagaacttgaaatattgaacatttccacttcatttccattcattctttccatttccttaggaaaattctaataagaaatgtaattcttaggagcagagagcaggggaagaaaacaggataatttataaactgtttaataaccttgtgagcaattgaatgttgaccatataaattctggataatatcattattgtactcaggttggctgttaaaaagtcataaaggaaagaattttaggcatctatttctagataactattaaaatggtgatcttatcattgcataccatttagctggggagacagaattgtatttaatgaaatgactcatttgttgtattggattcctgccaaattatttcatggtttgtcaaatgataatttcacaagtgtcagtgacaagatgttggacattagttttctcttttcctatctgctgagtcacagttctcaagggatggatattatagtgattcaatcacaccttagattttggcttacatttactaatcagtctagtaaatttggtaggggggaaatcgtgccatagcatataaaataatgagttccatttcctccccacattggcttctattttttgggttctgtatgtacctaggacctaatggggcacttgccacgtaggtccccaatgggagaaaaggttctgttaattactccatcacattaaacagtccagttagtacccatagaggtgaggaagaatgtgcttatgttttatgcttcaggcaaagtagctaatcagagagctgtgaacaattgtaaggaagtgacttgctgcctggttctctgcaatgactgatgacacagtctttttacatcacagaatgtgtaaaatttgttcacatgtataagctcttgttactttgagagggcaattctgggataatttggttgccatattatacttagtcaatccctatgtattgataatctgttttaatttgcatgttgatatacttactgacttacctaataccatcatttatggtttgagatatcattcttaatttccctttaataatacatgtaatgcatgggtttacctagccctaagactcatttcaaaatatattttctgaagttctgtagatgtaattattaaaatcacaaactttcaaactggactcataccccagctggctatggtacttaatgaaaattaaactttttgctcctcagttttcttatctgtataacaggattaaatgccccaccctcgcagttttccttttttctttttcttttcttttcttttcttttttttttttttgagacggagtcttgttctgtcacccagtctggagagtgcagtggcatgatcttggctcactgctaccgctgcctcccgggttcaagcaattctcctgcctcagcctccccgagtagctgggactacaggcatccgcaaccacacctggctaattcgtgtatttttagtagaaacggggttttgccatgttggccaggctggtctcgtacttctgtcctcaggtgatctgcctgcctcagcctcccaaagtgctgggattacaggtgtaagccaccacacctggcctacactttttctttaaggataaaagggaaatacgtgtattaccattgtgcttgtcatatagtaagtaccaaataaagagtagcttctaccattattaaaagctatcctggcttttttactattattaaaagttattcaaagcctacatatagaaggcatagctatatgcctttgtgtcacatgaatagtcaacttttctaattttttctgtggctgtgctttgctctcaaagtgtggcctgcatcagagtcatcagggaaggtggtggttaaaacggattcctccccggcatgttggctcacacctgtagtcccagcactttgggaggccaaggcaggcagatcccttcagcccaggagttccagacaagactgagaaacacagcaaaaaatacttaaaaaaaaaattagcgaggtgtggtagtgcaaacctgtagtcctaactattcgggacgctgaggcgggaggatcaggattgcttaaacacaggagtttgatgctacagtgagtgcatgatcatgccactgcactcgagcctggacaacagagtgagatcttgtttcaaatacagtaagtaagtaaataaataaacccagcaaaacacagatccctaggtctcactctcacgcttgattgagtatgtctaaggatgtgggcaagattctgcagccacaactgtctcccaggtgaggctgatggtactcgttctccaactaaagtttgagtagctttgccctggagtagctgtcccaaacaggttaatcctcagaattgcctgggaagatttaaaatatatttcccaaacataactgaatcaaaatttgaggagacattgtaaaaaatccatttgaaaattgttgcgcaaattagaggttctcaaacttgagtgcacatcagaattttctggaggccttgttaaaacagattgttgagatacggaatcaacctaagtgtccattaacagataaatgaatttaaaaatatggcatataaacacaatggaatattattcagccataaaaagaatgaaatcctgtaattggtggtaacatggatgagcctggatactgttaagtgaaataagtcgggcacgaagagataaatatcacaagttttcatatgttagagctaaaaagtttgatttcatagaagcaggcagtagaatagtggttagcagaagccggggagggtaagagggaggagagggaggaaagggacaagctagttaacagatacaaaatgataagctaaataggacggatatgtactagtgttctaaagcactgtaaggtaacttcagttaacagtaatttattgtgcatgtttaaatagctagaagagaggattttgaaacttcccaacacaaagaaatgacaaatatttgaggtaatggatatgataattagcctgatttgattattacatgttatattcatataggaaaatatcactctgtacctcctaaatatgcataattatgtgtcgattaaacattaaaaagaaaacacagatttctgggtctcactccctgagatactaaccaagtaagtctgggagagtcctgaaattcggtatttctaaaaaggtcccaggtgacgctgatgctggtctggatccacactttgagaaccatagcctgccctagaccactgcttcttaactcattttaaaattaaggatctgtgtgagattctgctggatggtgtagattttcttgaaaaataaaaaacgtgaacatagtttccatatactttccagtgttcatggatcccttgaagtatgtctatgattcttgtatgaaagcttgactccagatagaacgtctttgagtaacatatcccaggttaggaatggaattctctggggctatttgcaaatctgtctaaacatgggaatatgccagtaacattttactccattacccagagaacaggaccaagtcatgttattacctgtagaatgataagagactttcaattctaagaattatggcttatttttacaacttgttggaatatgatttgcagatttggtgaaaatggtagttacttccacaaagatgtttaacaatttaaaagttctagaagtttgtgtttcctactggctttattctttatttttactcttcaaatctagctgttcgctgtctttttcctgaaacatttttattaaggaaaatacagaattttgcagcttatcagtttaaacagaaaacatccctgaaaagtcttcgactatatgactacattacttatacaaatcgtgatcatagtgaaactgaattactttgtaaataaccatgattcattactataagcagggttttgaaattatgactacctcgagaaaacttttattaagaataaaaaagcaactatctcagctggaccaataatagaaacaccagtatattcactcgctttttatttctcaaagcacatttgtggcttgtagccaagaattcattgcattgaaggagtgtttgacaagcagtattgaagctgtaaacactttgaactcattacagtgtctcaccataggaacttaactgtcactgaagacaccctgtctgtgaaaccatcattcctacaattatttttacctttgcctgaaaatatgcttttgtgctttaaggtatttcaaaagacaagagaaagatggaagctaaggaggctatagggatttcctgagttctgtgagtgctgtgttgatacagaacaagatcagaaacttggatatatatgtttcaacttaaaatgctgattgatcatcatgacaatagttttatagagcatttgtatgggggtgaatgtttgaagttataaaaagcattgtaatgttactcattcatgggctgaacaaacatttcctctttctctttctctggctttcttgccaattacttttttcttgccaattacttttttcttgccaaaaacaactgagatcacccccttaagtccattttgaaacaaacttagcaaggagtggttgttagtctgcaataacaatctacatctcaaactcacatccttacagttgttgtgtaggtatcatagctgcgtgaaacagtgaagtgtaagattgtgtctacagtggtctggaaaatttgactcataatcacatgtagaatacagtcctttaagaactctcccaccccgcatcactgccctgaagataatgagccaatgatcctgatggtaatctcttctaaaatcatacgtatttgagaaaaattgtatcttttcggagactggtaatagtccagatgaaaagtgtttatatcctgaacctagagtattgacaaagcagatgaagaggattgattgggatggagaagattcattgatgggacttaaggaatgactagatatgacaggatagggaggtgaagtatgctaggatgatctgtatgataatgtcttacacaagtgaacagaagtccagtttaaataacgaggtttggagggagggagtaaagaagatggatttcatttttcttaggtctaatttaatgtgcttttggtaaaatgtctactaggccaccatgtatatgaatctgaaccttaaaaaggaggtttgagcagataggtgcacagtttttaatcattagcatatttaacagttgaaaccatgagagaatatgccttatgagaagaagacaccaagatcacacaatgctaggaagaccaaaaaggttgtggcagagaggtgggagggttgatcatgagaggaataattaagtactaaattccactgaaaacattaagtaagatgtgggttaaaatagtttattagatttggcaaattggaagttttgataatattcaaaagagcaactttggaggaatggcaaaaaaaaaaaaaattgtaagaatggttatccttcctagaagatggttgcagaaatgattcagaaatagcttgtaagtagagggtaactgaaaagccctgagtgtgcttactagctggtgagagagggtttaaagatgaatatgtgttccttaaatccattttgtgtgtttatgaggacagggtaaatagtctagctaaatcaccacaccctgccctgtgcctagcatagtttctatatatttattaggcaccaaatattttaggtatatatttttttatgtaaaatatatagggaactgtgtgaggccctggaagaaacacaatgtctattttcattgaaaaagagctacattggagagactaaccacccatcactcaatactattttatttagttgtataagtaatgggtgctatggcagtttatgacagacagacctgcccttatcttgggggaaccacagaatgctttacagaggaagccatttttaatgttctactgagagcaaaatagaacttcctcccattcctcacccactgaacacattccacagagttaaaaactctgctttccttccacggtcacttttcttggcattcagaaattattggaaactgtaactatgggttcagtgccaacaacattctaacactcatggttagaatcctaaccagaaagagtacaaataagggtcctttcttttttgattttggctcagatatcgatgttactaataatgataataaaataatagtttaaatttaccctgtctttatgattttcagaatacttcccccttctagtttatttgggatgagatgctagggaatatgagtaggaaaatgataaagtgagacaaagaaggaaggaaagtcaatgaagactacatttcaagagtttaaactgtggtggacaactggcgctcaatttgactggggacttgaagaaaattatgtggaacacacacctcagacttatcctttgaagagatgagaatgctaaggtatttatacaccaactcctgctggtcatctgttggcagatcccgggaggggctgtgcattcactccctagcatttttgatctattgcatgcactccggaagaacagactccagtaggcaaagagatgcaggagctggcaggtggaagttggaacaatgtccactgaaatgcgaaggactcagaggaagagacagggtatcatcagcaccagcctaatggggtttgaatctccattttgccatttactagcagtgtgatctctggcaacttacttatcctctcttggccttcgtttcttcatctgtaaaatggggatcataatagtatctacatcgtaggattgcagtgaggattaaataaattattcatgtaacaattttacagaagagaacatgaaaatttcgaaaagattacttacttgtcaaatatcacacatatgggaagcaggccaaagccttgattcttggccccagcctttttccttatacctactgcccaatgtctgtgttgccttgtatcttcataatttacttcccattttctcattgcttaggtctcattcctgattcttttgtcccatttactctcctctaaacccttgtgattgtccagatgagctttagcttgggtgtctgtgtatcccttctgaatatttcatgcttcggccttgcccagcagcttaaacttacactattaactcccggtcttctctacctcgcatttttcctcttacctatgaggcatcttgacctataatattttcacttccaccagctgagtctatctgtggcacatgattacttgtctgattccttgttctcatggaatccttaggcttctctgatgtattttatcctattggcattcacatcccagtgggcacgaagaatatttaataaaaacattggctttattttagaacggaataaacacatcattctttcctcctaaaaataaaagacatattagttggattgtgtcattactgtagagtgatacaagccagaagatgcagtgacaatatcagaatggtgtgttatctgttaccaaagggaatgggtggtagctgtgtaaccaggtcatcatagtggcatgaccatagccaagtgtacggcaccatagtcaagggcactgaacaggtcattagttgggattgagtcaagagttggaccatttgacatggaacacacattctaaaaatatattaagttggtgcaaaagtaatcacggtttttgccattactttcaatggcaagaaaatgcaattactgttgcaccaatctaatagtaacataaacatcaagcggcttcaacttttgcctaacaagtttatttaaaaggttctaggctagtcatgtttaaaatggaacagctttattgagatataatttatatgccatacaatcatctgtttaaagtatacaactcaatgtttttagtatattcacaggactatgcaaccaaatattgtgttggtattataccaattagagatatgacaaaagctttggaccctctcatgcacatttgtacaaacacaaaagaatttgcatatgataccagaaaattcatggacttctctgaagtccatttatatgcccagaagtactactcgttcagccaaactctatcttaaggcagctattaattctgtttgtacaatccagcagacagataaggttgttgatcgtcttatggactcatggatatcaccttaacgacaacaatatatgtgccaagtctggctcctaaagttttaggattttgtgtttaaaaagggggagaaaagctttagtatgtttcgaatcctaactgacagtgagtgacaaaggtttgaaaaaatatattgcagatgtgtgaacatctggaggctaattgtacatgtttaggtactccataatctcatgaaaacttttgacctagaaatgtcagcgctgttgccctctcaaagagtcatgattctttatcacatcgctttattgtaaaatggaagtacatttagtggcaatatccgtgtgattagctatgtccagtcatcagatttttcttgcgttattatgattattacagattctattacactatgacattgagcataaatcaccagcctccttctcggcacatacaagagtcacttattttctaaaggttaccaaatatactaacttgtttaaacaaacgtacacacacaccttcctatatctgggtaggtacagactcagataaatcttcatacaacagcatgctataatgaaaagaacttaagttttagagtcataaataacttgatttgaatccatgagtatatatttacttactgtataatctagggcatgttatgtaaacacttgagaattcaatgccaaccttgggataacaaattttacccagcaagtctatgagaaagatcatagaaataacgcatgggaagtacttaaaacagtgtcctacacatggatacagatcaagaggtagtaaatacactcacaaaatggtctaattaagaaagtcttccatgagtttatgccctccaaaagatgagattcgaggccaattttgtgtcataaactttatgcttttataatattcatttctattttatgattatataatgcttaaataataatatagtaaatattcatgtaaaattcttacaccgaaagataaatattgttaatatgttggtggtcattaacttctccttctctctgttctttctcctctcttatttatgtgacaatatatgatccttttttctgaggtttaatagtgattcccatgttttcctcttccatagataccataaatctgttgatacacatgttctctttaccatgaaatagatcccttctctgtaccatggcccctataaatcaggatacactacattatgcatctataagaataattctgatatctcagcgactcaaaagaatagaattttcttcccgccaaacttcatgtcactatagattggtaggcgtctcaactcattgtactcagctgaaggacctgggctgagagaagggtcatctcaatataaactttaagaacgcaagagaacatgtgaaagcacacgataacccgtaaagcttctgcttggaaatggcgcacatcacttctgttcacatttaatttgatgaagtaagtcacatggccatatcaaagtacaagtaggcagagtaaaagatactatcaggagcctggaataaaagaatggaactttggtgaatagacttaatggcaaccacatcccttaaaacaagggttctcaaacttgaacatgcatcagaataacctagaggtttgttaaaacagggagtgttgggatccaccccctgagtttctcatcctgtaggtctagagtacagccagagcggttgcacttctcacaaattcccagttgctgttgattctgatgtctgagaaccacactatgagaactgctgccctaaagtataaaagctcttctcttaagattccacaatggaaaacacttcaacagtggtactttcgactgtccatggtcacatttcaaccacatacttctcaagtttccaaatttatctcaatctccaaccactggtctgttaataatttcccaaaattgctgtattatttcttttcctctggtggaatttaattaaaatatctttcctacaaaccttttccaaatcattctaactagaagtattgcctataccttttccatagtagtatacacctttccaaagtgatcacatgctttgtattatggtaatcttacacttgtgtttttctcagtttcatgaactgttttcaagcgcactcatagaaatttacccaaaatgaatactaaaacacttaattttttattcctgattttgccacattagggtaaaagacttggccacatgttctaaatttaaatcactactcttgtctcagaagccatgtgaacagtagggaggacagcataggttctggagctggactgcctgggtcaaaactaaccttgccactttttagctgtgtaaacttgtgcaaatttcttaagatccctgagccttttcctcatctagaaaatgaaagtgagaattgtattcataccataggactgttacaagaattaaatgaattagttgatttgaaacatttagtgcaggacttggcaagttttgagccattataaccattataattgcaaaacatcctgaagttattctctatgcctgaagttacattttcttaatatccattttctccttaatcccttaaaagctgtcttctgcctcatttattctatcaaaactgtattctcaacagtcactaattatattctaattgaatttcagagtgaatttcacacctctccttttgaaagattcatttctatgaatttgggacagcttcctagtatgatattccatctataagtatatccatatcatctatatcgtataccttatctgctctgctaactctttccttgtgttattatggatgttctccaattctgttctgcagacgggtgacaagtgaacatgtagaagaagttttcagtctcctagttttacctccattcaattaactttaaaatctacattactagttctgctgtgtcaccggcagtccaagaaaagaaacctgatcagtttgtgaaaatagctaatatttaatatgagcttattatgtgccagctactttacctggagtttcttatttaagccttacaattgctttattaagggctaggaacttcacatgtacattaaaatgtagaagcaaactgttgaggagagaaaggaatttacccatattatacagataactaataggaagtagagattggatttgaatgaatccaggactgatgtcgaagcccagtgtcttaatgttattttgggatgtctgcatagatttttttttctttataagggagtgatgattttaaaagcaacaagacccaccttaggtaaagtccatcatccaaaaccaaactcagttttattcctgtgcctacgcaaccacattattggatgcctagaaaatgttcaaacttctaaccaagtcactggtaaccctctgtgattttggcttaatcaggtttattcatcagttttgcccatatttcacttgagctctagtctcattaccttaattacagcttcctgtatgtctataggcttttgcttctatagacccaatttatatggtatcaactctatatgaagccgtttttgaatctcctagtaatgctttaattttcctaaaattcctgttatatcaaatcagatttcttttttatttttttgtcagttataagtttattttttgtgagggcaaaaataaatttgttggataatgagtttgtgagtagtagatcaatttgttcacatattttgcaaaagttagagcttattactcattcatgtactattgatgtaacgcattagaagacagttaacattagttcctaattgcacctgaccaaaaggagctgtgggcctggcctatacaccttattgcgtgttcagcatcaactgatttagtgaagcagcaaaaagaaaaatggtgtgtgcagtattatctttctgccacagatacatgtttttaatttccaagtttccaatgcatcattcagttttatctaatgggaatgcagctgagagaagtttgtatcaacccaaaactacatgctaatatagtttagttttcaagacttgtggagtctttttttttaatggaataagatcatcagaaatcctggagcaagacagactggctgtggtctaccagcattgtagtaaaaacattggggaagttttataagacctaattattagaaaataccataaaatagtcattttcatagaaaaagctttcctttctttcctcacactaaatcacattactttgtgttcaaggtaaaatggagtttgaaatctggatgtaaataagaaaagatattattttattccaagtgaaacatgtattcacacttcacgtcttgaagcaccaggtggccatttgggctgagttttcaagaaaaaaaaaattatatagattttatgtccccccccttttgttgttgctgttggtggtggtggtggtgatttttattttttggtaaagataataacatatgaaacaattttcctgttaattaaaacttactctatttatgagcatgatattttaaagaaattttttatatataatgaatatttggatatatatgtggttaatggttattttaacaaacattttggtttgctgaaatttttaagtttttttttcttttattattatactttaagctttagggtacatgtgcacattgtgcaggttagttacatacgtatacatgtgccatgctggtgcgctgcacccactaactcgtcatctagcattagataaatctcccagtgctatccctaccccctccccccaccccaccacagtccccagagtgtggtgttccccttcctgtgtccatgtgttctcattgttcaattcccacctatgagtgagaatatgtggtgtttggttttttgttcttgcgatagtttactgagaatgatgatttccaatttcatccatgtccctacaaaggacatgaactcatcattttttatggccgcatagcattccatggtgtatatgtgccacattttcttaatccactctatcattgttggacatttgggttggttccaagtctttgctatcgtgaataatgccgcaataaacatacgtgtgcatgtgtctttatagcagcatgatttatagtcctatgggtatatacccagtaacgggatggctgggtcaaatgcgatttctagttctagatccctgaggaatggccacactgacttccacaatggttgaactagtttacagtcccaccaacagtgaaaaagtgttcctatttctccacatcctctccagcacctgttgtttcctgactttttaatgatcgccattctaactggtgtgagatggtatctcattgtggttttgatttgcatttctctgatgcccagtgatgatgagcattttttcatgtgtcttttggctgcataaatgtcttcttttgagaattgtctgttcatgtccttcgcccactttttgatggggttgtttgttttttcttgtaaatttgtttgagttcattgtagattctggatattagccctttgtcagatgagtaggttgcaaaaattttctcccattttgtaggttgcctgttcactctgatggtagtttcttttgttgtgcagaagctctttagtttaacgagatcccatttgtcagttctggcttttgttgccattgcttttggtgttttagacatgaagtccttgcccatgcctatgtcctgaatggtaatgcctaggttttcttccagggtttttatggttttaggtctaacgtttaagtttttaatccatgttgaattgatttttgtataaggtgtgaggaagggatccagtttcagctttctacatatggctagccagttttcctagcaccatttattaaatagggaatcctttccccattgcttgtttttctcaggtttgtcaaagatcagatagtggtagatatgcggcgttatttctgagggctctgttctgttccattgatctatatctctgttttggtaccagtaccatgctgttttggttactgcagccttgtagtatagtttgaagtcaggtagtgtgatgcctccagctttgttcttttggcttaggagtgacttggtgatgcgggctcttttttggttccatatcaactttaaagtagttttttccaattctgtgaagaaaggcattggtagcttgatggggatgacattgaatctgtaaattaccttgggcagtatggccattttcacgatattgattcttcctacccatgagcatggaatgttcttccatttgtttgtatcctcttttatttcattgagcagtggtttgtagttctcctcgaagaggtccttcacatcccttgtaagttggattcctaggtattttattctctttgaagcaattgtgaatgggagttcactcatgatttggctctctgcttgtctgttgttggtgtataagaatgcttgtgatttttgtacattgattttgtatcctgagactttgctgaagttccctatcagcttaaggagattttaggctgagacagtggggttttctagatatacaatcatgtcatctgcaaacagggtcaatttgactttctcttttcctaattgaataccctttatttccttctcctgcctaattgccctggccagaacttccaacactatgttgaataggagtggtgagagagggcatccctgtcttgtgccagttttcaaagggaatgcttccagtttttgcccattcagtatgatattggctgtgggtttgtcatagatagctcttattattttgaaatatgtcccgtcaatacctaatttactgagagtttttagcatgaagggttgttgaattttgtcaaaggccttttctgcatctatggagataatcatgtggtttttgtctttggctctgtttatatgctggattacatttattgatttgtgtatattgaaccagccttgcatcccagggatgaagcccacttgatcatggtggataagctttttgatgtgctgctggattcgttttgccagtattttattgaggatttttgcatcagtgttcatcaaggatattggtctaaaattctcttttttggttgtgtctctgccaggctttcgtatcaggatgatgctggcctcataaaatgagttagggaggattccctctttttctattgattggaatagtttcagaaggaatggtaccagttcctccttgtacctctggtcgaattcggctgtgaatccatctggtcctggactctttttggttggtaagctattgattattgccacaatttcagatcctgttattggtctattcagagattcaacttcttcctggtttagtcttgggagagtgtatgtgtgcaggaatttatccatttcttctagattttctagtttatttgcgtagaggtgtttgtagtattctctgatggtagtttgtatttctgtgggatcagtggtgatatcccctttatcattttttattgcatctatttgattcttctctctttttttctttattagtcttgctagcagtctatctattttgttgatcctttcaaaaaaccagctcctggattcattaattttttgaagggttttttgtgtctctatttccttcagttctgctctgattttagttatttcttgtcttctgctagcttttgaatgtgtttgctcttgcttttctagttcttttaattgtgatgttagggtgtcaattttggatctttcctgctttctcttgtgggcatttagtgctataaatttccctctacacactgctttgaatgtgtcccagagattctggtatgttgtgtctttgttctcattggtttcaaagaacatctttatttctgccttcatttcattatgcaccccgtagtcattcaggaggaggttgttcagtttccatgtagttgagcggttttgagtgagattcttaattctgagttctagtttgattgcactgtggtctgagagatagtttgttataatttctgttcttctacatttgctgaggagagctttacttccaagtatgtggtcagttgtggaataggtgtggtgtggtgctgaaaagaatgtatattctgttgatttggggtggagagttctgtagatgtctattaggtccacttggtgcagagctgagttcaattcctgggtatccttgttggctttctgtctcgttgatctgtctaatgttgacagtggggtgttaaagtctcccattattaatgtgtgggagtctaagtctctttgtaggtcactcaggacttgctttatgaatctgggtgctcctttgttgggtgcatatatatttaggatagttagctcttcctgttgaattgattcctttaccattatgtaatggccttctttgtctcttttgatctttgttggtttaaagtctgttttatcagagactaggattgcaacccctgcctttttttgttttccatttgcttggtagatcttcctccatccttttattttgagcctatgtgtgtctctgcacatgagatgggtttcctgaatacagctcactgatgggtcttgactctttatccaagttgccagtctgtgtcttttagttggagcatttagcccatttacatttaaggttaatattgttatgtgtgaatttgatcctgtcattatgatgttagctggtgattttgctcgttagttgatgcagtttcttcctagtctcaatggtctttacattttggcatgattttgcagcggctggtaccggttgttcctttccatgtttagcgcttccttcaggagctcttttagggcaggcctggtggtgacaaaatctctcagcatttgcttgtctgtagagtattttatttctcctttacttatgaagcttagtttgcctggatgtgaaattctgggttgaaaattcttttctttaagaatgttgaatattggcccccactctcttctggcttgtagggtgtctgccgagagatccgctgttagtgtgatgggcttccctttgagggtaacccgacctttctctctggctgcccttaacactttttccttcatttcaactttggtgaatctgacaattatgtgtcttggagttgctcttctcgaggagtatctttgtggcattctctgtatttcctgaatctgaatgttggcctgccttgctagattggggaagttctcctggataatatcctgcagagtgttttccaaattggttccattctccccatcactttcaggtacaccaatcagacgtagatttggtcttttcacatagtcccatatttcttggaggctttgctcatttctttttattctttttcctctaaacttcccttctcggttcatttcattaatttcatcttccatcactgataccctttcttccagttgatcgcatcggctcctgaggcttctgcattcttcacgtacttctctagccttggttttcagctccatcagctcctttaagcacttctctgtaatggttattctacttatacattcttctaaatgtttttcaaagttttcaacttctttgcctttggtttgaatgtcctcccgtagctcagagtaatttgatcgtctgaagccttcttctctcagctcgtcaaagtcatcctctctccagctttgttccgttgctagtgaggaactgtgttcctttggaggaggagaggtgctctgctttttagagtttccagtttttctgctctgtttcttccccatctttgtggttttatctacttttggactttgatgatggtgacgtccagatgggttttttgtgtggatgtcctttctgtttgttagttttccttctaacagacaggaccctcagctgcaggtctgttggagtaccctgccgtgtgaggtgtcagtatgccccttttggggagtgcctcccagttagggtgctcgggggtcaggggtcaggcacccacttgaggaggcagtctgccccttctcagatctccagctgcgtactgggagaaccactgctctcttcaaagctgtcagacagggatatttaaatctgcagaggttactgctgtctttttgtttgtctgtgccctgccctcagaggtggagcctacagaggcaggcaggcctccttgagttgtggtgggctccacccagttcaagcttcccagctgctttgtttacctaatcaagcctaggcaatggcgggtgcccctcccccagccttgctgccaccttgcagtttgatctcagactgctgtgctagcaatcagcgagattccgttggggtaggaccctccgagccagatgcaggatataatctcctggtgtgccgttttttaagcccgtcggaaacacgcagtattcgggtgggtgtgacccgattttccaggtgctgtccgtcacccctttctttgactaggaaagggaactccctgaccccttgcacttcccgagtgaggcaatgcctcaccctgcttcgggtcgcgcacggtgcacgcacccactgagctgcgcccactgtctggcactccctagtgagatgaacctggtacctcagatggaaatgcagaaatcacccgtcttctgcgtcgctcactctgggagctgtagaccggagctgttcctattcggccatcttggctcctcctctcaaatcagatttctgatccaatatttcaagttttaattttcccactggtaggctctattcctactctttttctgctcatggctgaaaattttctgtatctcccatctctttcatatttgaatctattgaatacatagcctccacactcttaataaaatactaatttcatcatgtaacttcattattcaaaatatttagtggctcccactacctatattaaagattccaaactcagtagttactaatatttttcataggctttctagtcctgtcctttcttttagtcttatctcttactactttaagcttattcctagggcaaacatcttactatttccaaaatgtgattcaacgtcattcctattgcctaggaagacactcttctgtcctatggctctctaagtctacttcctgttgaagtactctttttcataaacattcaaattgtttttgtgtcctactttggtgttacctgacatattttaaaactcatggattggatcacatatctatgcatttacttatggcaccattacattttatttattttaagagacaagatattactcttttgcccaggctggagtgcactagcacagtcgtagcttaccacaggcctccaactcctgagtcaagtgatccttctagctcagcctcctgagtaactagaattgcaggtgtacaacacaatgcagaggtacatttaaacaattttttattgttattttgtagagacagggtcttgcttcattgccccggttggtctcaaactcctggcctcaagcgatcctcctgcctcagcctccgaaaatgctgagattaggaatgtgaaccattgtgcctggcccacgttacattttaacagtggggatctgaacactgcagtttcccaaagccaaaaacatgactaactcagctataaatatttaaccaactcttaagtatacctcctggaccatggtcatatagagcagaggctgtgctactatatatgctttagttttgctagtacatttagaaaattgtttattacatagtcagtactatggtgaatggttaagatatgttgaatgccctgctgagacaacgtttttactttgataggaaagtcaaaagaataacacacatatttaattattaaagaaccagaacatgtagttttctgaatttcttagtataaaaagctccttaagagacataagtatacaaatatacacttcttcatctatgatactctattaaatttggcatatttctttttaacaaaaacttacaagggtagaaatctgctgagatgatatatgaaatgtggaaatgttaaagatagattgggggggtggttaagataagacattgaagcatataatactcctcttggagaatcattcagcttgccaagctaccatgaatcagtgtttgaaaagaggcagaagatacatacatagaaaaatcagccaaaatattcattaacatgaaatgtttccaaagctgaagtgctacattaatggttgactttgtgcctcaagactaaatattgggcaatgttagctttccctataataaaacttgccccaaaatatatgttgagtatcccttatccaaaatgcttgggaccagaagtgttttggattttggatattttcagtttggaatatctttattatacatacgagttgagcatccataatctgaaaatctgaaatccgaaatgattcaataaggatttcccttaaaaatgatcgtgtagttactcaaaaaattacagattttgtagcatttcagatttcaaattttcctattagggatgttcaacctgtattgaacttacttgcttacacgtgttgcccgtttgctgtactgtaagctctgtgaaaaaagtatctgctgacttctttgttcataattgcgccctagcaccttttgtggtagttggaaaatggtagacactgagtaaatatttactaaatgagtggataggtaaaagtatttcagtttggcatggcaagatggaaagactaacagtgtttaagtggctatggccaacgtcaggccttcttcagtttaagaactgtggaaagaagaaaattaaacaattaaggaaagataagaataaatccaacaggaagttctcactgaagccaagagattcaaaaaaatacaggaagaagaagaggaagaaaatactattttctatgcattatattcccaaagatatctgccttactgattaatatcaattaataccataactatcacattttctcataggccaaggtgaaatgtctgataagacaagctttgttgctaacacaatttaactcactttagaatattaacatgacatttatgtggtctactcctctctaagctcaaataaagcagctgcgtataaaaagcagccatggattaaatgacttcagcctgctttgtggaaactactgctgttaaacctgctcttgataaactacaaagagtgcctggactccatttatgaaaagacatttgaatatagacctcacatggtgatcatttaaaaatattatattttgcctgtattacaacattgggttgtatttttgtttaaatctctacttcatttacttatgcgtgtaatactgacttgcttcacaaaatgttactctggagtgtctggcaagcttcctaacaagaaatttgaaagcagttttacatgaaaatcacatttttgaattttatatttctagacaagttttagtacaagcagtgtaagagcataagagtagtctatgtcatatgctatttgtcagtctccaatgaagagtaaacatttatcagcttcagtaacaatccctgcctaactgaggagtgtcattttctgaaaatattgattgatagaggccttgcctaaaaaatataaaatgcatgtaatttacacacagctgagaaatacaagctcattttttcctgacaagcagtaatgccctttataaactatggagattaaattacaaaaaaagttaaattaaaaacaaaagtatgatcagagtgatcagagttttgtgtggtacattttctagtaatcatgttttacagcagtctaatttggtaaataaaagtgaattggaatatattttaaaggctaatatgtatatgtgtgtatgtgtatgtatatacatgtatatgtgtgtatatatacatcatagaaacctttatatttaagagaaaatcatcaacaaatacttttaacacatttgttgttatgacgcagtaacatgtatcctaaattaggaaagtcatgtttccggatattttcctaaggaaatattggttctaaaaattcagcataggaacgtcaagtattttattattcactgaagggaccaataatatcaatgcaagcagaggcctgatatagaaaaattaattaaggtgattatagaggtgtaagcaggactctagtaaatgaatttagaaggtggtctagtcagttgcttgaacattaatcagaatttagagttctgctctgttataaactcaatggtctcgtgaaaccatttttatacaagtctcaatgaattcatctctatatagttcttgttccacctactttagtattttttgaggagcaaatgagataatgtgtgcgaacataagacacaatgtgtaatctaagccaatctgggcagattaccttctctagtgcagattagagatatctatgcattcactaactgaatttttgtaccagttggaagtgtttctgaagcagatcttttttttgctagtctattataattattaaagatgatatcatgcctaaaatttgtcacattaaagaagcatcagtatctttgtaacattcacacattgattttacttcaacctagaggaaccatgactgcctttaaccatttgaaaaggtctttatgaatctaccatctccaagatgaatacccacagcctttattattgggctcacttttggtgtcctttatcgtcatggtagtcatagctcctacatctagtaaacgttaggcctagaatttgaattgccttgattctcaaataatatctgaatccatcatcttatatatttataatttctttgaatatgtgataattaattcagggtaattagcacatccaatgtctgtgtgtagaaacattgtgttggaccccataaatatgtataattatcatgtcagtcataaataataaaaaaaacttcccacaaataatttataaacccatgcagtccttataactgctctttccaatattaatttcagacttaaaggtgatctgttaaattttatcttactggtttcgatattattatagctaagacatccatagctgaattttattacaaagagtaaaagctaccctttccaggagagtaaaatattttattataatagctgtatttttatgccttaagatccaagatcattggcaaggtatatttggtggaagcagtccaaatgagagtcacatgaccatcaagtagatataactttaaactgacacaaggccatttgccatcactttttggatagggtgtgctgccacatgtgtgtttttaaaatactatattttagtacagattcaaaattttgtctgtgaatttattatgggagacattgataagctacattgtgaatatgaccttatctatcgaactaataatatgatcaaaagagaaaatgacatttgttcatgggttgatttgctaaccccgcagtgtcataaatagtttatagtagtgtcattgcctccatagaaagttaagattgcgtagattcttcagctgtaataaatttgtaacatatatattggataaaagtatatgagaatgttcaaaacattatttagattaagagatatacctattagaaattgcatatattccaggggaattttttaaatttttgtgggtacatagtttgtatgtgtatatatgtatagaaagagagagacagtacatgagatactttgataaaggcatgcagtaaataataatcacatggagaatggggtatccatccactcaagcatttatcctttgtgttataaacaatccaatgatactgagttattataaaatgtacagttaaattattgagtatagtcaccttgctgtgctcgcaaatactatgttttattctttctaaggaatttttgtacccattaaccaaccccagcttacctccaccccctagtaccctactcagcctttgagttgagatctctctctctctttagctctaataatatttgctttatttatctgggtgctccagtgttgggtgcctaaatatttgcaattgttgtatccttttgctgaattgacccctttctcattatataatgaccttttttgactctttgtttttgtcttgaaatctgttctgtctgaaaaaagtacagccactcctgctgttttttggtttccattggcatggaatatcttttttcatccattttcagcccatgtgtatctttataggcggtcattaaagatgtcaagtattttgtagaatcatagcatgtatataaacacatgcatgcatatacatatatatacctatggactacaatattatagataaaatttcataagtgactatgatccatgatatgagaggcagagaatgctcagcagtgggatccctctctcaagccatactgtcaaatctagtatattgaaatttctggaacacccttatatattagagtctttaccagaaatgctggtacgtttattttaactgttattgcagaaatggctaagaaaacaatgtctagattctaaagcaaggattaggattgtatactttcttctgttgtgttacacagatacaaccaaacaatgactatttattaagtactatctgtggctaaggtgttgtacttgaggctgtgttatttacgcactaagctgttaaagtttatttgatgtttactagagctttctgatgccaagaacacaactctggttttggtagctctcttttttccattgtttaaaaatgctaaagatcatgcaaataattaacatatgataaacattttttaatctcagtaacattgtaaatttataatatgatgagaaaaagagctgaaagattactgatgtaatttataacaggttagtatttttagttcatcattataaacccagaagagaagagctaataaagttattcagttgtgcttatgtaaatcttttggatcttgagacttatttaatgactggatgaagattttaagtgccatgggatatgtgagctacatggttcaactgtacaattggatcactgttcattttatgggctgtgatatacttcacattgggttgatttattgtttcagagtaaaattagctttaacatgttttcttcctaactgaattgtaaatcaattatgttaacagctcctcttggtaagggcctagacaaaatacatatggtcaataaccattttgtgtgaaataagcatataaaaagcagactttagtagactactctagatttgcatagttcctcataaatcaactttatgaaaatgataagaactgaacagaaatttatttgaagaatttgagccataacagccttataaattaggttcacttcacctattttattcacctcgtttagtttcagcaaaaaagtctgatttaatttagagtttattattacttttgattttaaatgcacaattcttaattgtatatttatacattccagttggaccaattttttgaaaggatttcctcaagaagtagaattgcaccatttaaatgtattatatttgacttgtcaactgtcgaatctaattgtcatcatttgaaatacaacaatatgtgctaattattttagttttagtttttattcttttactggatgtacttaaggcaaccttgtccaactcacagcccatgggctacatgtggcccaggacagctttgaatgcagcctaactgtaattcacccactttcttaaaacattatgagatttttttgcaggtttttttttttagttgattagctattgttagtgttagtgtattttaggtgtggcctaagataattattcttcaaatggagcctaaggaagccaaaagattacatacccctgatttaaggggtacaagatgttacgatatacatagacataatgaaatgattactgaattcaaccaaattatcctatccattatcttccataataactgttttggtatggtaagaatacctaaagtctcttttcttagctaatgttcagtgtacaatacaatgccattaactgtagtcatcatactaagcagttatcgagatttatttatccaatataacttcaagtttgtgtcctttgacctacttctcctcatttcttccaaacatttaaagagtaatttataccatttgttcttaaaatcttctaaataatagaagaggaaatacctccaaagccatttatgacttcagcatcaccctaaatacgaaagtcaaacagacaccgcaagagaagaaaatatatatatgccaatatctaggaggaatatagatgtgaaagtcctcaataaagtattagcaagacaaataacacattggattataaaccgtgaccaggtgggtttagccctaggacacaaggttggtttaacatacacaaatcaatcaatgcgacatactacattaacagaaagatgaaaaaccacatgattatctcaatacatgcagaaaaagcatttgataaagctaaacatccttttattattataactcttcgcaaaatatgtatggaaggaaatttcctcaacatcaaggctatttatgaaaagcctatagctaatatgatcaacggtggttgtggggtggttgtactgaaagctttccccttaagatttgctaaaaagcaaggatgcccactcttaccacttccatttgtcatagtaccaaaaatactagcaggagcagtgagacaaaattaataaaaggctttcacatctgaaaggaagaagtaatattatttctgtttgcaaatggtatgatcgtatatgtagaaacccctaaggactccacaagaaaaatgttagaactaataaatgagttcagtaagtagtggaatacaaaatcaacataaaattagttgcatttttatgcaaaagatatccaaaaaattttaaaaaattctatttatgataacatagaataaaatatttaagacccaatttaaagaagaaagtgaaaaatacgtacaaccaaaactataaaacattgaggaacaaattaaaaggtaaatatatgggaaaatatcccatgtttgtagactggaagaagtaatattgttaaaatttccatactacccaaatggatatatagctgtcccttggtatccacgggacatgggttccaggatgccagtggataccaaaatccaaagatgcttaaatcccttatacaaaatggcatagtatttgcatatacctatgcacacccccctatatactttaaaacatctatcgattatttgttattacacctaatacaatgtaaatgctatagaaatagttgttaccatatattatttttacttgtattaatattttttgttgttgtattgagttttttgttctatttttgattatttctggtctacagttgcatccgtggaaatagaaggttgactgtacaaatttaatgtaatccctgtgaaaatctaaatggcattttttttcacagaaataaaagagcattataaaacttacatgaaatcccaaatagccagaacaatcttgaggaaaaaaaagttggaaatactgctctttggatttgaaattatatcataaatctacagtattaaaaagagtattgtaatgccataaaaacagacacataaactgatggaacagaatagagatctcacaaataaacctaagcctatataatcaactaattttggacaggaccaccaagaagatatgtggggaaaggacagtctcttcaataaatggtgttgtaaattgtacccttgtcttatactgtacacaaaaattaagtgaaaatggactaaagacttaaatataagacctaaaatcataagactcctagaagaaaacagagaggaaaaagctctctgacagtcgcctttgcaaggattttttgaatatcacatcaaaatttcaggcaagaaaacaaaaataaactagtggaactacattaatctaaaaagcttctggaaagcaaaagaaaaacacagcctacagattatgagtagatatttgcaaaacatatatctgataagggtttaatatccaaaatatataaggaacttgcacaattccatagtgacaaactaaataacccaattaaaaaattgggaaagaacttgaacattttttttttcaaagaagatgtgcaaacggccaacagggaaattaaaacgtgctcaatatcactattagggaaatgcaaatcaaaatcataataaggtattacttcatacctgttaggatgagtattatctaaaagatgagataacaagtgccagtaaaggcaaggaggaaagggaaccctgacatactgctggtgtcggtgtaaattagagcagacattatggaaaattgtctgggagtgtttcctcaaaaagttaaaaatagaactaccatatgacccaacaatcccactcctgggtatagacccacagaaaatgaaatcagaaccttgtggagatagccttactctcatgttcattgcgttatgattcataatagccaagatatgaaaataacctgagtgtccactgacagataaagaaattgtgacacacacacacacacacacaaatattcagcctcacaaaagatagtgccatttgtaacaacataggtgagcctgaaggaaattacactaagtgaaataagcaagacacagaaaaaaatatgctacgttatctaacatctgaaatctgaagaaaatgtataagttgaatacatagacagtagaatggtgattaccaggagtagtgagggtgaggaaataagtcaatgtgtacatggaaacttgcagttatgtgggataaataaatttagagtttcgatatacagctaacccttttttaaaaaaatataaaagcagataataatggggtaaaatgtagtgttttgatctatgcatacattatgagaaagatttgatctagctagttaaaatgtctatcgcctcagctacttaaccctttctaatatttatctaaaatatgtcagatccagagatgtatgaccagattttaacatcatttttaatgtagaattgacagttgtaacaatgattttctcagtttgcttattcaacacccatggaccaagataataaatttaggacctatttaagtagtttctaaaaaggcgttaaaaaaatccccatgggggcaaacaatgtgaatcgaataacatttccaaatgaatgtaatttgctcatttggatgtgagctaagtaaaaaaacgattgtaaaagaaaatgtaagtaatagaaattatctaagaagagcaatgagatgtgttccatctgtgaccaattttggtcaattttttcacaggcatttaatgggtgcaaaatgagccagtcttggtattagaccgttaaaatgcattgtcttctaggagttcatattgtttcccctcccattctgaaaaaaattagaaaaggtaacaacaataaagaattgtggtagacaaaaactcttttgtaaggtatgatttgactcgtataataggtgttacgagtgttgagtggctctgtcagatagaaacagtcaaagaaatgctagtaatgttgtcttgtttgctttacttgtaagtatcttgtgtattttatttacttaatatatttaatttactttaatattaaaacgtgtgtgtgtgtatatatatatatatatatgaatgaatgaattctaatgggtcaggtcatatagtatgtgtgtgcacgtgtgcacatgcaagctgggataacaacgtattatatgatagagtctatctggtgataaacgttcagaggttggaaaagggcattgtgtaccaagctcttgaggtattctgggaaataactgcacaccaagcatttggatattgactgactgataacagtaaatgtacatttattcagctaaataaatgaaaaaaaaagtatcaggcattccaagcagtgaaaataacttaaataagaacacaaaagtaagtctacatttaatatgctcaaagcatcatgtgcatctgtacaatatccaaaatatttccaccagaattaaattttgttattccattattttactataatatttggaggcaaatgcatattaacataatcagtttaaactttgcaatactaaggtttctcttttatttagtacaatgacccaaagttatagaattatttgcctctgatttcttggcaacatatgtatactttactgaaaatttcatctacttcattcttcatcaccctacactcacacagagaaacaaattgataatgagaaattgaaaaggaatatgaaagctcagtgctgatttttatttggttcatgtaaacctctagaagcttagctctattaagattatctgaacctttgtaatactttctatttgaagctatttgcttccaaccagtctatcttatattaattattattttcaattcatcagattatgtggatgcaatggctgataagttgagatatactttgaggaacactgctatgataatcatgatagaggatgcatgggtgattcatagtatttccaactatgtccagttatgtttagtgtttgtgaatcacctatttgcctaccttctctagttgagtaactatatatgtaggtaattgaatcagactattttgctaccaagaatatagcctcttccccgatataaagaggcaccaattacagattatttacctaatggagcattttaaatatggaaggttattaactatttacacttgagtcaacattggaataaaaagttttagctgacaaaattatttgctaagtgtgtacttccatccacatttgccatatattttaaagagcaataaggaaagtcttttaaagtgatgaaattcagggctttcatttaattgatgtttttatgtgacatatttatattaataataaaatgcaaaacagtgaacaggtaatatttaatctttgttcttccttttcttaaagtcaggaagccagaactagtcagtcctatcagtaaaagcaaaagtaatatatccaatgacatttgcttaaatacattaccaagtcctgagaaaggttcttactaatctgggaataaatgtccttatcttgatatgtgtattagtccgttctcacattgctataaacaactacctgtgactgggtaatttataaagaaaagaggcttaattgacttgcagttccacaggctgtatgggaagcatggctggggaggtctcaggaaatcactgtggaaggtgaaggggaagtaggcacggcttacatggccagagaaggaggaagagagagcaggcagagatgctacacgctttcacacaaccagatatcatgagaactcactatcattggaacagtaagagggaaatctgcccctatgattcagtcacctcccaccaggcgcctcattcaatattggggatcacaatacaacatgagatttgggcagggacacagtgccaaactatatcgttctgccccaacccctcccaaatctcatattgttctcacatttcaaaatacaatcatgctttcccaacagttccccaaagtcttaactcattccagtattagttcaaaagtccacagtccaaagtctcatctgagactaaggcaagtcccttcaacctatgatcctgtaaaatcaaaatgagttacttccaagatacaatgagggtacaggcattagctcaaaagagttaaatcgatcagaagaaaggggttacaggccctgtgcaagtccaaaacccagcagggtagtcattaaatcttaaagctccaaaataatttcctttgactccacatctcatccaagccacagtgatgcaagggacaggctcccaaggccttgggcatctccatccctgtggctcagcagggtgtacagcacccttagttgttttcatgggctggcattgagtgactggggcttttccaggtgtatggtgcaaactgtcactggagagaccattctaggctctggaggacagtggccctcttctcaaagctcaagtaggcagtgccccagtggggactctgtgtgagagctctaaccccacattacccttctgcactgccctagtagaggttctctatgcaggctcccccgctgcagcagacttctacctggacatgcaggtgtttccacacattctctgaaatctaggtggatgctctcaagcctcaactctcacactctgcacacttgcaggattaacaccacatggaagccaccaatgcttatggcttgcaccctctgaagcaacaccccaagacacatctggggcctttttagtaacagctggagctggagtgtctgggacatagggagcagtgtcttgaggttgtgcagagcagtgaggccctaggcctggcctccgaaatcatttttccttcctagacctccagacctgtgataggaggggctgctgcaaagggttctgaaatgcctttgggcattttcccctttgtcttggttattaacattcagttcctttttacttatgcaaatttccgcagacagcttgaatttcccccaccaccccgagaaaataggcttttgttttctaccacatggtcaggctgcaaattttctaaacttttatgctctgcttcccttttaaatataagttccagtttcagataatctctttgctcatacatatgaccgtatactgttagaagaagccaggtcacatcttaaatgttttgctggttagaaatttcttctaccatataccctaaatcatcagtctcaagttaaaagttccacacatacctagagcaggggcacaatgctgccaatctctttttgttaaagcattgcgagagtgacctttattgcagttcccaataagttcctcatcttcatctgagaccacctcagcctggatctcattgtccatatcaatatcagcattttggtccaagcagttcaagtctctaggaagttacaaactttccctcatcttcctgtcttctgagcgctccacactgttccaacgtgtgcttcttactctgttccaaagttagttccacgttctcatgtatcttcgtagcagtgccctacctctcggtaccaattttctgtattagtcctttctcgcattgctataaactacctgagattgagtaatttgtaaagataagaggtttacttaactcaaagttcttcaggctgtacaggaagtatggctggggatacctcaggaaatttccaccttcttgtggaaggcgaaggggaagcaggcacatcttataccttacatggccagagaaggaggagaaagcagggggcagtactacacacttttaaacaaccagatctcatgagaactcattatcatgagaacagcaactgggaaattcaccctcatgatcctatcatctcccaccaggcccctcctccaacactggggaacacaactcaacatgagatttgggcaaggaaacaaatccaaatcatatcaatatgctagaatgactcaaacaataaatacgacaagaatattcctcctctgtattgacgctgttcagtatttttctggagaacctagccaatattatatgacgagagaaagttacatgaaatatatattggaaagcacaagataaattatttgaaaataatatgattttctcattatgtaaaatgatctcaaaattaggaaatgtacagtggtaataaaatgatactcagcatagttactttttgtttttcagtttccacaaacaagtgagatcatgcaatatttttctttctgtgtcttgcttatttcacttagcctaatgttcttcggctccatctgtcctgtggcaaataagaagatctcctttttttgtgtttctgttttgagatgaagtctcactctgccactcaagctggagtgcagtggctcactgcaacctccacctccccggttcaagtgattatcctacctcagcctcccaagtagctgggatttacaggcgcccaccaccacacccagctaatttttgcatttttagtagagatggggtttcaccatgttggccagggtctcaaactcctgacctcaggtgatctgcgtatctgcctgccatggcctccctaagtccctaagtgctaggattataggcataagccaccacacctggtcaagatctccttttttttttttttttttttttttttgatggaatctctgtcaccaggctgatgtgcagtggcacaatctcggctcactgcaacctccacttcctggctttaagagattctcctgcctcagcctcctgaatagctgggattacaggcgcacaccaccaagccaaactaatttttgaatttttagtagtgattggcttttaccatgttggccaggatggtctcaatctcttgaccttgtgatcctcctgccttggcctcccaaagtgctgggattacaggcatgagccaccacgcctggcccaagatctcctttttaaaggccaagtaatattccattgtgtataactatatagagagaataaaacagtggttaccaggttgggggtggaaggaggaaatggggagatgtaggtcaaagtctataaagtagcaaatatgtgggataaacaagttgaaagatctaatataaaacatgaggattatagttaatagtgtgttgtattcagaatttttactaaatgagtagattatagcttctcgtggtcagagggtgggggaacgattatgtgagatgatggatatgttaatttctttcattatggtttcattatggtaaccatttacatgtgtatcttatagcatcatgtgtataccttaaaacacacaataaaattatttttaaaaaagagaagttccaaaatctatgtagttttcttagaagtaaaccgcacaagaaagtataagcttttttttataggaagtttaaagttgtatataagtacataaataaagacatgaggaaaggaagtcacatatgatgaaaatgctagttctccctaagttagtttgtacattgaaagtaacttcagtcacactcgcatgttcactggagcactatgcgtaatagcaaaatcgtggaatcaagttgtgtccatgagtagataaagataatgtggtgtgtatatataatggaatactaacgagccacaaaggaataaaattatgtcttttgcagcaacatggatgaaactggaggctatcatcctaagtgaaataagtcagaaacagaaaatcaaatactgtattttcctataagtggtaactaatcaatgggtacacatggacatacagaattgaatactcaacattggagactccaaaagatgggagagtgggaagggggtgagagatgaaaaattacctattaggtacattgtagactatttgtgtgatgggtacactaaaagccgagacttgatcactacacaacatatccatgtaacaaaattgcacttgtaccccttaaatctaaagttcctgaagttacttcaatcaagatctagatggtccctgacttaagatggtttgactaatgatttttcaactttatgatggtgtgaaagcagtgtgcgttcagtagaaaccgtactttgagtacccatttaatcatgccatttttcactgtcactactgtgctcaatgcattacacgatatattcagtactttagtttttatagaacaggctttgtgttagatggttttgccaaagtataggctaatgtaagtgttcttgcatgtttaaggaaggctaggctaagctataatatttgacaggttcagtgtattaaatgcaattttgactcactatattttctatggacaatgggtttattggaatgtaaccctgtcataagtcgaggagcatctgtataattacacactcacatgcccacaaacatgtatgtatgcgactctctgtgtatctatatttgtattattttagaggatataacagaaccctagcaataaatagaatttatctcagatggtaaaatgaagataattgtattttaaaagttacagaagtatatattaacaaataggtgacaagaaataatctagagaggagcaatagtaggaagtagttactatttctactattcctactatatagtagctgaaaggaaagggggaacggagttcagtgaaagctgcaccaatggagggaatgtagttgttggtagaactcagatactacattatgcagctctggagcagggaaataatagagaaatttccccagctttctctttccctcttctttcaatctccagctggtacttcccaccagcttaatgcaactggaatctagccagctaatgatcacaggagatacagtgtgaaagggtcagccacttagagaataagcagagaagaaagggtgtttatgttcagggtgagcacactgaacataaatcacatgaatggtaagagggattcagttttctagataattctaaaatttgtttaaatgtaaatgcgtgagtacagttaagaaattattttcaaacaggtgatttgctttagtagattttataacatacttaacatagtatgacatgatagagaaataatttaatggtgtggaatagatattttgacaacattcccttttatttaggtaaatttagtacacaattagggtgacatttcatgtctctagagatagaataggttagctaataaagccttcaactgtggaaacccaaggcacaacaaatactaagataactttcagataatgattgaatgtgaataaacatttaaatactttattacaatgtagaagaatattacaataatattaaggtgatataaaacctagaggctgtaaaataccgacaaatttaccaacacaaaattaaaatattttccattgtgaaagaccattaaacagtaataaaacctatgatggactgcagaatgacactagtaataaaaaatcaataacctcagtatgataacactcctacaatgaatatacaaagtataatattttaaaagtggctacatattatggtcaggacattcacttgggaaaattagaaatagcccatcaaaataaaattaagcttaactaataaataaatgcatagtacaaatatcttcttattatgagggttcatgtaaataggccctgtgtttcttttggaggaaacacaacttgtaatattttaatcagacaatttagtattatctttcaaaatatgtaattttacatatatttgatcctgaggtttcacatttaagaattagatatatagtaatactcatacatatctacgacaaatgtgtaaggatgttcattgcagcgttgtacacagtagctccagtatttttcatgctatggactgttaggcagatatatctctaccattggactataggcaccataaaatcagggtctaggtttgtttgtgtttgtttttatttttgctcactatttcagctgcagtgtccagcataatcctcgacttatggcaagtgtccaataaatagttacagaataaataaatggataaatgaatacatgcattactgaaattaattttgaagttcacattgtatatatacatgtgtatatacattttaaacttgaaatttgctgaaaacatactttatgccaggcattgctctaaatgccttacttgcacttaccttcttggaaaagtctttgcctcattttaccaatgagggtatgaagaaatgaagaaattaagtttcttatccaaattcataataccagtgagtggtaaagctaaattttgaatctttactaattgagcacatcttaagaaagtacatgcatagacagtgtatatgtttaatctcattagacaggcagatgagtatgataaatggatagctaaaagaatggctgaatggatagatgcatggatgtatggatgacatagcatctggtgacaagtattacttctagctaatgggactgtggtgctgtagagatatggggtactttcactattaactttaaatgcgtctgtactgttttagttttccactacaataagcatgtatggcttttgtaataaaatgtttaaaagtgagagattaaatccagacttatgaaattaaaatatcaaagacaactaacggttgaactcttggggccaaaaccgtcaatgggatgtgttttctctgagggaaagctttcctaatcaaggggcacgttcccattgagataagagtggaaatgacccatctggtcaatccaagatcagagcccatatggggactggagctatgataaggagtcaggctccataggatatagtaattgagatagttataccaagcccctgggtttctggtcatcaggaaagacaggcccctgctagtagagctctacctgagggagaggtatttgagagaggccgacatttcagagtcaagaagaactggaagctataccaagaaaatgggttatgtggtatttagcatatcagttttaaccctcatccagccactgagaaaaggaaagaagaaattttaaaattgcaaatggacaaaaggaacattcagtaattaaaatagcagtaagattctacgcaaagcctttccttttctctatttagtctttgaagttgctaatatctagtcaaagggagttgctttccaaatatgtaatgtttgcatgcatattatagttatatattagtgatcatattgtttataaatgtgtgtataccatcctaggtttttgtttctttattgaatccctttctcatatatctgagcttaaaaagcattttttacaattatcattatttggtagaatcctacccaccgctgactcatagttttagtgagatgacaaggaattcacacacttgaatctttcaaacccccaggtatgcagacgcttagcacaaaatttttggaagctatgcttccaaagttctaaggagtctgcttttcctatcctcagtctgagagcacttgagtacatttttttttctgtagatatcagtcaatattatttttgaaaatacgtttttgtaaagcacggtgctattttgtagtgtgtatgccaaagtttagaacaatgaataaaacattagttttcctgtgtcttgagtattttcaatctgaatttaaaatgtactaactttgtcatcatcactcataggcttcttgattaacctgctaatgctctctaatttggaaattaatgcttctttccctatcacttaaaaataatctgatacagtttctagagcatgagatgttcttcaaatcaagtcttatttttggaaatgtgatcaataagaaaaacttcttgcaatacaataggaagctgaggtgcattatgcttaactttatccaaggtcacaaaatgaaagaactgggagccaaaccaaggactctacttttttttttccactttaatcagactgtcacttattggttgtatgaccttgggctgtattcttaactcacaagagagtggtgaatttaaatgaaaaaaaaacataataaaagttcttgtatataattgatacttgataaaaactaattctataccaaactgaatctcttttgcagaattttgtagggagaaaaatacaggctgctcctgttccttgctatgtgctttctgccccttcaagcagtgctcaattttcaacatgtgtcttactctacattcagggggtgtagaccatgaaaatgaacctttattcccaaaaggttctctctccattcatttactgatttaacaaatactgagtacctactacttctcagtcattggtaaaacaatctaaaggaagttcctgcctttgtggtttttatattcttatataaaaaataaacataataatgacagtttgtgacaagcaatgtaaaggaaatcaatgtaaaataaagggaaaggggttgggcttctttaaatgggataggaaatgcatctctgaagaggtgccatatgagttaagacctaatgggtgagaatgaatcaaaaatgcaaaaagagaaattattttaggtaaaagagcaccaaatatgaagatcaagaggtgtaaaatggccttcggtatttgagatgcaaaaacaaaacaagaccaatgtgtgaaagagaaagagggatgacattagagtgcttttagctaagtgtgaaggattgggtcatgctgtactttacaggcatggaaggcagtgtcttttaacacatacatcaaattctattcactattcaaaaaatatactttagtatatacattttaatgaaaatcaatctcagctatgttttacgcattcttaacatcatttattacattctcttttataaagttatcccttatcatcatcatatttgtgttacatggttttggatgcttactctctttttcacttgtacctttctccatcaatgcttcacatttgattatcttcacttctgtaaatttctaaattgcatttttttcacattggaaattacttgacatccatggatattattgtatttgtagttgggaggtcctaattacaatggtggaagccagaaactccaaactcaaatgaaatttcataagtactgtcaaaaggaaaatgtatctttgtaatttgaaaatgggttaaagtttgctacttcttgattgggtgtgtttcatcagcatgcctccagtagtgcttagaaaatacacaaatgcgtgatgttcgtccactggtttcagttttcagttagagtactactgaaaactttggattagttcaggaaaacttaattcgccatcagttattttgtcagttgttgaagtttgtgtgtgatggtgttttgctcaacactgaaccccttattctgatgttgcgtatgacatatgataccaccatgacaccatcccacataaatgttttgtgctgagagagtcacatcagtgttgtatgccatctggtttgtccaatggtccactcgtttcttccttaggaattaggaaatggagccattctaattataaaacgtgattaattgcttggtgaattggtatcatgtctgacacatggtaggcattccacaaatacttaatgaaggcatgaatgcaagcaaacctatgaattacaattatgtgccaattggaaggaaatcaggaaaaataatagatcgtatatattgagcatttactttgcattcattttctctgttaacatcatccctaattatttgcaagatactaatatgactcattttatagataaaaactgggacagggaaattagtgaattttaccacagtcccttacctattagtgatagggtcaggatttgatcaaggtatttttgcctcaacaggctaagctcttttatatgtagtgggtccatttttaccatatttttttcaaaaaaaaaaaaacctgatcattttgtacaatatctgcgttaagctagtcatcattgagtaatttgccccaggactgcccttataccatcaggcatattttgaaatcccaaaatataccagaaagaataataaccaattaaatttatgtcacatgaaataaacatctttattctggcctcactgtgtatcaagtataacttctaacactgtaaacaattaaggttcacaaatagactattttatgttagcgaggaagataaggggtggagttacttctgaaactgactatactttttctagcagcagaggaaagaaaaagtcaatttggttaggtcaaaagcaaagcacgaaaaccgcaggtgacaatcacttaagcagagttaaatgtcactgagtcaaaatactttcatctcaaatgtaaaccctaatagttcttcccacaacaggcatgtcgagagaattgtaagaaagtacagatgtttttctatctgtagtctcccatgctgactgagtagcttccatttgttatgtcaagttagtgtctgttctcctgggtttagaagttacataccaaatatttgttctaaggatttaaatagtcaaggatgtatttttcaaataaaatatatttaacatatgtaaacttaggacaattgtgacggaagagacaattttgaaaatttcctgcatttggaaattgaaaatttaaagatagaacttttcctgttgattagggcacacggcagaaatttgatttttgaaaaacttttcaactgaaacacgtcttatttaaaactcctaaagtcacagttggttgcgaattttcatttaactgacttttccccaccagcttctgtgcatttgctctgaggcactctcaggatgtttggtattaacactgcagagcttccattctgatttaatttccaaaaactatcccagcgaagagggcttttatggaaggcaattcaatgaagcagggatacagtggcaagtggtaaactgagaattttgaaattatttattcgtaacttcctttcccattacagtcattctttcatgagaacatatctctgggatcatttatttaccattgtattattaaagtctaaaatatagcctggcacaaagtaactcaataaacgtttgtggagtatatttttctgtgtctcatattttcaatatagatttttttttaccccctccgagacggagtcttgctctgtttcccaggctggagtacagtggcgtgatctcggctcaccgtcatctctgcctcccgggttcaagcaattctcctgcctcagcctcccgagtaggtgggattacaggcatgcaccaccatacccggctgatttttgtatttttaatagagacggggtttcaccatcttggccaggctggtctctgaactcctgacctcaggtgatccgcccacctcagcctcccaaagtgctcggattacaggcatgagccaccatgcccagccatagtttttacaatcactatcattacttccagctaccattatttactggattggctgcatgataagttccatttgtattggtaggtttaggatttattgattaacagaacgctcaaatagttttcagtgtatcagtcttctaaaagcatctgattttccttttttccctgttatgctctaggcaagcattatgcattttgagccactgtttttttcttttttaattttttgtttgtttgttttttgagatggagtctcactctctcacccagggtggagtgcagtggcccgatctcagcttgctgcaacctcctcctccctggttcaagcgattctctaacctcagcctcccgaatagctgggatcacctgggattagaggcgtgtatcaccatgcccagctaatttttacattttttttttattattatactttaagttttagggtacatgtgcacaacgtgcaggtttgttacatatgtatacatgtgccatgttggtgtgctgcacccattaactcgtcatttcgcattaggtatatctcctaatgctatccctcccccctccccactccccccaccccacaacaggccccggtgtgtgatgttccccttcctgtgtccaagtgttctcttttttcagttcccacctctgagtgagaacatgcagtgtttggttttttgtccttgtgatagtttgctgagaatgatggtttccagcttcatccatgtccctacaaaggacatgaactcatccttttttatgactgcatagtattccatggtgcatatatgccacattttcttaatccagtctatcattgttggacatttgggttggttccaagtctttgctattgtgaatagtgctgcagtaaacatacgtgtgcatgtgtctttatagcagcatgatttatagtcctttgggtatatacccagtaatgggatggctggctcaaatggtatttctagttctagatccctgagacatttattcagccaaaaaacacatgaaaaaatgctcatcatcactggccatcagagaaatgcaaatcaaaaccacaatgagataccatctcacaccagttagaatggcgatcattaaaaagtcaggaaacaacaggtgccggagaggatgtggagaaatttttatatttttagttgagacggcttttcaccgtgttggccaggctggtgtcaaattcctaacctcaggcgatgcacctgcctcgtcctcccgaagtgctgggattacaggcatgagctaaagcgcccagcctgagccactgttttctacttgtaacaagatgatggtgatagttttctgctagttacaccataagcatgttgaaaagcgtaatggaaagtgcaaaagataaaattgttttgtgtttctcctggataaatataggccattactttttatcgttattaattttatgatgaaattcaatcatcttcatcaacgcaaattatttccattatgacattttaccgtcctttaatgagaagcattgttactaaatggtaaaagcaactgcttgtatcagtgaatgaagtgctaaaaatggattaattaaggagtacttaatttagctaaggcagaacatatcttgcagaatgttaaaaaatttaacatgggaggagttgtgcaaattttaattaaaatgttgtatatctattgtatatagtgacttgtaagtagagaatacatgtatgtacaatgcagtcagtgctgaatgccaaatacaaaatattaaaaataacaatatcatgctttaatgaattagtccattgccatgatatggtctacaacttagaaactccagcatttagatatcagatgatattataacataaatctcttcgtatgcaagcctcaaaaaataatccactttacttccagcactttgtccttttagaatatcacatcaatgaattaggttattgtttacaaccataggttttggttgtgccaacatataggcctttctgttttcatattttgagcattctggctatggctagtttatgaccagaagtgccttctttccagtttctctattccttttcttctcagtgaatttatttatttttgtttcctaatacaaaccctgtggggaggttgatgctcatcatggtttctaaatgacatcctctcacagtttttgttgtttaataaaactcttaaaagactgaccaactaaagctttgtgagtgcacatttatacctgctatctttgaaatcttgcttgttttcaattacacatgctatgcattataattctgtatttccattcctgcctgtcccttggcagaaacttggcctgaaatttagacagtagagcctcttctttagatttcccagcggtgtttgaaggttacacccagcgactggctaatcggacttccctgaggttgactgcccaagattagttttgttgaaggcactgctttcatcttacttactcacattgactttcttggggtgagggcatgttgaaagcaaactttgtgcgatacttggtcttcaaatacactgagatagtatctgagagaatgaggttaaggtaccatggcagtgtagtgcaatgactggtttctaatctgattttgactagcctttgaatttgccttcagaccgccatgaggttcaacttctttattcgaaaaatgatcaaatttcgctaaatgatttatttgttccatagtatcctcaaatatgaaacactcatcagaaacggtgttattgttcataaagtaaaatctctagcagtattgtgagttctcactattttcattctgagacggcttcaaagattggataagcaattattaaaatctggtgtccgtgagcattttatgtagtagagtcttggtgtaaaattacgttcatgtaattgttaagttcttactttggggattcagccactgctctcatttcataaaatcttaatgtcgtgtaataagaagtataaattacatcccatcattttcatactcctcaaatactttatagtactcattatcataccattgcctttagtcactgtcttacataattctcatcaatttctatgactttaactgtcctctgtattgagtttcttaacaaatacttaggtgatcacagagtgccaggaattggccttagtgcagtcatcataaatgaggattaccccgaagtccataacatttattttgatttcccataaaaagtaatgtttataattatggggtggctcatctgctatatactcataatctaacatagtctaagtatattctatagcacatgacaatcacttagcacatatggaataagtgataaatgctttttccttctaagtaaattcttctggcttcctgttaatagtatacaaatggtctcctacaactaggtttgtttttgtgttaatgatagaaacagcaaaaatatgacaaaaatgacaaaaaaatgcaacatagtaatggtattaaggttcaacaaactttacagttttactaaacattggatttgggcttcataacatcttaaataagagggaatgctcctggtcaaccacagtctctgaaaggagcgtattcttaggttttgcggggggagtcagaagtccagcaatctaagaacatttcagattgggaataggatgatgatagctttagaagcgtggtaactcaggtgagaccattgttaattagtttgagaattatcttcattgaagtgaatccactctggcaaagtttcagaagggagtgtttgctgctggttggctgggggaagcatgataagaatcatggaggaactaattgttaaatgaataaatagggtagattgaaacttttgttggtgtctacttgttaccatggctgcagaacaatcagtgtcctctttcgtcctcttcctcctttgttttattgtcagtttattaatctttatatcctaaggctgtagcacataactttgtatataggcatttccaaagactgtggagtaaatgatttgaaaattgaatgaagtcatttttgatccatcttagaatttttgtcattcattgacttgttttcatttcccccgtacacagttgtaccttagatcttgaacactttatatctggattatggtcctagcctcctatttctctcaagttttcctccagcaatccattctgtacttaaagaatttactttaataaaattttgatggtgtcaccctctcattgaaaagtatttactctctagtctattgaatgaaggccaggttttctagtttgctgttgatgatccctcagttttctatgtacaatctaccagtttcatcttagttttcactactctactctctctaagacacacaaagccactgttgccaagacatcgctaatgtgtccctacctctgcatgtttattctacatattcccactgccccgaatactcttccccattccctcatttccagctattgaaatcctatgcataattaattcagtttcctatttaaagagaattgccttatcctccaatattatatgattttaaaaatctgaacatgttaaacaactggttgtgccaattagaggaacacattttaaattctgttcagcaatgcaattactttgtacttctattatttactttcttattccaaattagaagcagaattcatgaattttctatctttcaaatttcctggataatccattaaaatactttgaatataatagatttcttgaaaatgtatgttgatgaaattcaaaatattttagaagacctaaattcctttcttcaaaaattacttatttctacctactggcagttttgaattccacataatctcagaagtgggatagtaatagtttggggcaaaatggcaatagtttggttaaataagtgcatatttattgtaatgactgatatttatgaacagctgcatttagtccacatgttttatgtaaatgaaatttattacaatgtttgaaattttttggggggcaataaaaataatgcttggccaatttttcaccattttttactttttataatggcatatatttgagaccaaacatacatgcatgtgtctatgtataacacagcagtgaataggcacaggctcaaccctttttgttttctcacatcatggttttatttaatatactaaaaatgaaagagctctaagttatgctaatcacaggtacagctgactagttactagtgagaaggaagaacattttctagaatttcaagatacggtgaagtatagtatctactatataagaaacaattggtcaaatattttgaaaaacaattatcaaatgaattggagatttctaggcttcagaattccaaagctaagtttgtaagattattaaggaaggcagtgttcatgcacaaaatattatttagttcttctttaaaaagtacttgcaaaaattactttgaccatctgttgattaataattaaagtgtaataagttgagccatatgtgttgtataactttgtacctttcagccttgtgcattgaaatgtctaatatcatttgaataaatgaataaaacaataaaacgggagatgatgtaacagtctgcttataagtaatgtttttggcccttattcaaaatgtagcagactagcagtttcagcatcacttgggagactattgcaaatgcagagctccaggctctaccccgatctattgaatcagattctgtagttttaaaagatccccaggtgattcatatgtacattaagaattgagaagcactgtattgttctacggatagaagtagaccaaggaacattaattttttcgtctcttgtaactctttttaaaaatactttaaaaatagctgttctgattaatcatggttctgatacttgcaaaagaattgatgaagtcacttgttcaacctgcttttgtgctaacggacttgagactttactcttggctttttcacttataatcagaacacctgatcagaatatacatactgaatacagatatcttaatagtagttaagctaagataaattgtatggcaaggaaaatacattgccacattaccttgacctcctgccaggatttatgtttatcttttatctttgatttttatattcattaatgattaaaaaactaaaattgcatacatttatcatgtacaacacgatgttttgaaatatgtatacgttctggaatggctacattgaactaattaatacatgttttacttcatatgcttagcatgtttcatggtgagtatacttaatatctactctcgcagcaatttttaggaatacaatacattgttataaactaggttgtacaatagatctcctgaacttatttttcctatctaactgaaattttgtgtcctttgaccaacatcttcccaacccctgccccacagcccctggtaaacaccattctactctctacttctatgaattcaactttttagattccatgtgttagtgagatcatgtggtacttatctttctgtgcctggcttatttcacttaatatcctccagatttacacatgctgtctcaatgacaaaatttccttctttttaaaggatgaaaaaggatgacaatgaaatgctagcatttcatagtcagaacttatgtgttaacatttctagtactaatgacatacttcacataaaggattactttacatcttggttcactggaatgagtgcagtaagtaaattttaatgccaagtagcaaatgaatcttttgaaggagctgccactttatatgtgttattacaaagtattattgactttaaatgctgcgtttcattcactttctggatgtggcaaaggatatgaagtcagatcaacttaatgtgcgggacttttacatttgtctctaatgtctgagaaggaaagtgatattctactttatcccatgcaccacaatgtaaacaaatatttttaacatacacggaatagtaaaaatcattatatggtatttttctgtttaatttatattgtggatacatgactcatttcagcagagacttatttagctctctgcatactttaatatcagcaacattcagttaaaaggtatcaggtttctttactgagaaccaaagcggtaaaccattttgtgtatttgtttaattaccagtgcaccatttgaattgacatgttaatataactttccattggagggaaaatgtaatcttttatttttgtttcttatctaatgaaagctactctgttagatgggctagtttggcaatttgacttaggaaaaagtaatatggaatgaagtttttatatgaacaaggaaaataaattaactttactgctcatctcattggtctgccaaattggaaagacattttaggcctcattctcatgttctaattagtctctggaggacattcatggacaattcactgttcattaatctatcgtcttcctttaactttgatttgttcattatccttttagagtctcaaatatagaaaccaaaaattgatgtgtagtgttaatgtgcttacagatgttgataccacctatccagataagaagtccatcttaatgtacatcacatcactcttccaagttttgcctcaacaagtgagcattgaagccatccaggaagtggaaatgttgccaaggccacctaaagtgactaaagaagaacattttcagttacatcatcaaatgcactattctcaacaggtaaagtgtgtaaaggacagctactattcaagatgttttctgttttatatgcatttttaggtattacgtgcacatatatatataacttatatgtatatacacgtgtatatatacaaagcctaatgtatgtatatgtacaaaaagagacagactaaaccttttcaattttgcttcattgactacaatattcatttcaaaacatattttaaaaatactattcatatgtaccatatcataggaatatagaacataatatattaaatttccattgtgtaacacacaatgaaatgaaaggcaaacttacgtacatattaaactctaaaatcttcatcaactagaacaaagagctagagaaagattaaaggcaaatacagtttttaatcattaaaaaatactttatgacaatatgatgtacaaagtcagattttgattattcaggataacaattttgaaaatagaaaagtgttttaaactatttcaaataaacaataaagaaaaacatgatgaaattcttcgttacataattgtatagaatttagtggggttcttccatgacattggcttgttctttctctcaacagtgggtggtttggatgttttcctatgctttctcaggcacaaacaacagtgaagaaacctttagcaacatttctgctgaatgtgtggagagctcttaggccaaactctctcactttgctgagctagctctgtattagcttatgaaatttttagtcctttccagggtatggacctgatgaattctgtttttatttactttggatttagagaaaattgcttatggatgcctgtttttgccggattgaagagtaccatcccatataaatgttggagttgtgttactttggaatcctcatggctaaatagcatgctcatatcttcccagatcatttactctccaacatgatattaagtgccttcattctgggagtataccaatttcgaatatcatttatatatgtttagtattaaacattgaatctcaccatttccatttaatgttctgttttctaccatgttggaaagtagtcctttcgggttacttatggtttttccccctcctctctatccactcccccaaacccttctctgcagatcacggtcagtctagcacagggatatgagagaacttcttcccctaagcctcgattcaagagctatgcctacacacaggctgcttatgtcaccacctctgaccctacacggagcccatttccttcacaggtctgtcaacatttactctctgttgtacaaaccagagaactgcttccaagataatctaacactgcttttacttgcttgaatttttcagtgccttttatctcctcgtgaagagctggtttgtttttccaagttttattgattccctcatgtgattctgctttgttattgagtcttctctaggtttactatacgttgattcttcataaatatgaattcccgtaatggtttctactttcattatgtaataacctctaaggttctctttgacaaaggctgctaatggttataaaaaacatgaggctcatgaaaagttttatatatgtaacttcgaaaagtgtaggtacatctgtgaaaattgctaattacactatttggggagatttttctggatctacgtaaaggaaatacatacattctaagtgaattattttatctattcattctaaaatatatattctatgtaagaaaaatataactgcaagcttcttcatatgctctcctttaattttgctaatttaaacttgtgtatagcaggctctgtagtatttataagaaaaagtcacactgaaaccaggtcatattctcggcaatgtttagtactttctatatgaggaagactcagtggagttttccaccctttcaatattgtatggaacccaatatacaagaaatagccttataaatgttacagcgtgggaatgaaatgtgctaggattgctagatttgcaagaattactttttaacaaaaatgatttattttgctcaatggagccaattcgaaacgtgctagaggatgtgatttttatcaaaactacactatgaatgggagtttaaaaatgatagacctgatcctatcggctaaaaaatgtgtacatttttggagactcaattttttgttaagatagtggtgtgcatttaattagtaatttatttggcagttaatcgatgcattagctgaaaattctaagctttgaaatagttatgacctccatccttggctagtttacttgcaaagctctcttctcactctctctcattctggacctcttgactctccatcgactctctagactcaatttatcaccattccctccgttgaaatcaccaagacttaaggaataagtgccacctcctaagattaaggagcatacaccaagcaaagatataggggtttttttccccctctcattatcactttattgagctgccttttctaggttttctccaatgcctattctggtagcacattttcacctcatcaccaccttcattaaggcatcgctcaggtatgactccttaatgaagtaattacaaatggacttacatcttgctaggctctgctcattctacctttgtgtaaatattaccaaatacataatatgtcataaatcacagataattcaacaaattcacttacttgttttatttaaaataagccattcaaataaatgtaatgtttatcatttaaaaaagacacagcacaaatcacaagagatgggggatggggaatgatatattctgtcactaaaggaagcatatcagaagatgatgttacatgtagttaggtttgataagtgtatgccttaattattcacactaagaacatttatttcaaaagtgtcaaaaggactgagctttcactgcccctacaggctgtacctgctctacttcaaaggaactcaagacaggctggatctgattccatcagaaagctttattaaagtgtttacttgctggtctacagagaaaaataacgttctctataagaggagagagccatgtgggtgactgtcccctatggaaaacacgtgcatgccctcactccccagacacatcactctgctttaacttcatttatttattcaacaaataagtattcttaatcacagagacaaatggcttttattcagctctcctaactttctaccactgatgaaacatttttctcagcctctacactcagcgggttcttcctctctgactattctgtgtctttcattacctggctctttctgttcttccaacttctttagcttatgaaactcatgggaaatatcttggcattcttatctctgtacttgttcttttatcaacataatttaataataatttaataacctggcttcaatctgtattcaatctgtatgcaaatgatcattgtatctctgtcttcaccacttccaatcttacttgagttatagccacatttccaattaattttcaactctttgtatgtatctataccttgatatccactaatatctcaaacctagtatgtctccaagtgaagtttattatgaagtttcttgtccattttttaatgttattcagagccctaataatacaatttttttcgcttaattttgtccatataacaaggctactctcctaaactgcctcgaaaagatttatgatatattaatattttatatttttatgctcattacacacgtatttcatgttccttcaaccaaattacatcactcgttctcccacacaggtgccccaaaattttccatattagcttttatgcttcccttagctcagagtgcttttgtctctgttttaaattggccaacttaatttgtatttctaggcctaattagtaagtggcagaacctgaattcaaatttgcatttattcaactccatgcccatgctcattatagtagggtgacgctgcactttctcgacggtgattcttatatattgcgttacgcacacatagagcagtattcatacatttgattatttagcgcttgtgtttgaatcacctattatgtgccaggtactgttattgaagcaagtgacacataaacatgcaaaacaatctgtgtctgaaagtattctaattttattatcctcctgctgtcttccctcatgccatacgtttttaactcatttaataaatggtaaggccgggcgtggtggctcatgcctgtactcccagtactttgggaggccaaggtgggtggatcacctgaggtcagagttcgagaccaaccgaaccaacatggtaaaaccccatctctactaaaaatacaaaattagctgggtgtggtggcgcacacctgtaatcccagctactcgggaggctgaggcaggagaatcacttgaacccgggaggtggaggttgcagtgagttgaaatcatgccattgcactacagcatgggcaacaagagtgaaactctgtctcaaaaatacataaataaaaaaaataaatggtatgatatgagccttttaattttatctgtgagcttttctgtttcatgatcctctagcatagcatatctggtagcagaattggaggccaatatttcatcaaagtcatttccctcctgatgcagtagatgtgacttatgaaataattagagaaatcaaggattaccgtgaggtttcttacttaagcaactggccaaatagagttgccacaaaccaagatgggtgagactgtagaaggaacaggtttgggagtgaacgttaggatttcagttttaaacatattaatcttgaggtgcctatgaggctatgaatgcatgtaaagaaggggttctaagatcagagttgaggataataatttagaagtcaacacatagatgttatttaaatccatcggccaggataagattgccaaggaaaaatgtgtagacagatgagatctctagatgtatatatgatgaggcatcagcaaaggggctgaaaaaggtggctagaaaggggagagaaaaaggagaagatagatgtggcattctggaatccagaagaaagtgttttcagagaaaggaagatacctaactacattaaatattgctgatgagttcaaataacatgatgattgaaaattattcagtgaatttaggaaaacagtagggtacgatgtctgggaaatcctaatatatagcagttactacagtggaattactaacactcctattcactcttaaaactttcccattttgaccgataaagttacatgctctctctagtttatatcccctttaataagaacaatttcagtggtgtgtgcatgtgtgtgtatttggaggtgttgctgattagagtaggttcaaacgacagtaaaagtgaaggctaccctcattgtaacacttaaaaaaacaaactacaccgcgagctgggtgtagtggctcatgcctgtaatcccgcctcttttggaggatgacgcggggagatcacttgaggctaggagtttgagaccagcctggccaacatggcaaaatgctgtttctactgaaaacacaaaaattaagcgagtgtggtggcacacacctgtaatcccagctacttgggaagctgaggcatgaggattgcttgaagccaggaggtggaggttgcagtgagctgagatcggccactgcactccagcctgggtgacagggcaagactcggtctcaaaacactaccctgaatagttgatggccacagggacaaaaacatacttcttttaaattaacccatcctgataactaatcatgtgtctatatgtattagttcgatttttgatgcaacaactacaaacctagtgcccctaatcaacacatattcattattttacagttctttagttcagatgtttaaaacaggtctcattcagctaacattaacatatcagcagggctgccttccttttggaggctgtagaggagaatccatttccatgccttttctagcttctagaggctgaccacattcactggctcattgccccctttcaacttcaaagctaacaagggcaaattgagtctttctcatatgacatcactcttacctatactcttctgcccccctacatctacttttaagagccttcattattacttacttgctatgtgaccttcagagaatttcttgaactctgggcctcagtttcctcatgtgtattattgaaactgtttctaactcatatagttattaggagtgttaaatgagattaattttataaagaacattgcatggtataagcacattgtaagttctcaaaacccggcaaccaatatgattactactttagatacatcaggggttagataagattttgtggtctgatctgagaaaatttttatgtttttattagcacttttatgagaagagatagcctggattctgatttataaacaaactcacaacctgtatagagttcggcaagttaatataccgagtaaaagattctaaggaaaaggatatccttttttgttctgaggttgctgaggaacaatcttggaaccatgcagagcagaacatagtaatgccttttataaagcagaaaaagcacttctgggtgattttacatccagcaatcctgtgttgggaggggatgaggcagaggagatttttcactctatctctgcctttgccccctcctggcacaacttgtccctcagactgtccacatattgtagaaagtaattggcaaacagaggatgggaagccagccagggagaccactccttagattaaaagtatcactaatttgcttcgaggaagcctttatacatcctgatgtgactgaacaaattacccagaaacagaattgttaggttttagctcaactctataaattggtacactgaagacttctgagtagaattttaaaactggaaggaaccttgaagtgaatatatgtgatgatgttattttcaacagttacactcttatcgtttaacttcttttgaaatttactttattgtgtgtaagaacacttaacatgggattcaccctcttaactgatttttaagtgtaaaatacagcattgttcagtataggtacaagttgtacaacagatcttgagaattttctcatctttcatagctgaaccttcgttaattagcagcttcccacttcctcctctccacagcctctagcaactactatttcactctctgatttgatcagcttgagtattttacatacctcttataagtagaatcatggagtgtttgtccttatgtgactgtcttatttcacttcccataatgtccttagggttcatccatgttgttaatgtggcaggatctctttctttttgaatattaatagtaatctcttgtatgtatataccacattttctttatcccctcatccatcagtggacactgaggatgtttccacatcttggctcttgtgaatggtgttgcaatgaacatggcattgcaggtatcccttcaagatcctgatttcaattcttttggataaatatccaaaagtgagattgctagatcaagtgggagttctgtttttaatttttgaggagcaactatattattttccataatagccatgccattttttacttcaccaacggtgtacaatagttccaattattccacatccttactaatccattttttaatagtaggcatccaacaggtataaatgtgatagctcattctgcttttcatttacatttccctgataattcataatgttgaacatattttcatacacctgttgaccatttgggtgtcgtctttggagaaatgtctgttcaagcctttagcccatttttaattgcgtttttagtttttttttttttgccaatgagttgtaggaattctttatatattttagaagataaccagttgttaatataatataaggtcttcaggtctgatcacaaaatcttacctaagccctgatgtatttaaaatagtaatcatgatattggttgctgtctttttgataacttagaatgtagctataccatgaagtattctttatataattcattttatttaaccctcctaatagctctgagttagaaataattctcataatatatatatatggtttgtattttcccattccatagattgccttttcacagtgttgatttgttcccttttctaaacagaagatttttagttttatgtagtcttaattctattttttttgcttttattgcttgtgcttttggaaataattgcgaggatgaatgtcacaagatttttccaatgttttcttctaggagttttatggattgaggttttacatttacatattttatccgtttggagttgatatttgcatatggcataagataagcaccaatttcattattttgcacgtggatatccagtttttccaacaccatttgttgaagagattatcctttcctccttgtgtatgcttggctctatcgtggaacatcagttaaccctatatgtgtagatttatatctgggctctattctgttctattggtctatatgtctgtcttcatgacaatacaatttatttttaattactgtagtttagtaatatattttgaaatcaggaagtgtgatacctccaattttgtacttctttctcaaggttgatttagccatttgggattctttgtggttccatatgaatttcagagtttttctctgtttctgtgaaaaatgccattggaattttgataaagattatattagttctgtagatttctttgaatgtaatgacaattttaagtccttcgatccatgaatgtaggatgtctttccatttgattttgtcatctttaatttctttcatcaatgttttatagttttcagtacatactctttgacctctttagtttattactgttttctttttggtgctcttgtgaatggaatttgtctcctagaaactcaactaatttttgtatgatgattttgtatcctacaactttactgatttttaaattggttctagtgtttttaatggattctagggttttctattcataagattatgtcatctgcaaataggaataacattcttcatttctgatttatatacctttacttttttttttttgcctaattattctagcaaggacttccagtattgccatcggtagaagtggcaagaatgggcatacttaccttgttcctcctgttcctgatttcatagaaaatcctttcagttcgcagttgttgtgatatgacctgcgatctttttatatatggcttttacattgaagcaatttccttctattcctagtttgttgagagtttaatggttttttttaaatagtgaaattgtgttgaattttgccaaacaagttttcagcatctaatgaaatgaacatgtgacttcttatttattctgttaacgtggtgtatcatactaattgattttcatgttgaaccatccttgtatcccaaggataaatctcacttggtcatggtatatgatccttttaatgtgttgttaaaatttgccagaattttgttgagaattttgcctctatatctgtcaaggatattgagttgcagttttcttgggatgtctttttctggctttggtaatgctgaccttataaagtgaatttggaagtgctccctccacttcagttttttcaaagagttcgtgaagcattggcattaattttctttaaaaaatgtttgatagaaatcacttatgaagtcacctcgtcttttgcttttctttgttgagagtttaaaaattacttactcaatcccttacttgtattgatctattcagacttttccatttttacacagttcagatttggtaggttttatgtttctaggaatttaaccatgtttttagattacagtttcttggtgtaaaattgttcatagtggtctctttatgaagattaaaggagcgttattgtgttatagtccaaaaacctagaggtttttaaaaaaatgatttagtgtaagtaacttaaaaacaaaaagttatttaaggtaaagccctcattaagtatgaaaattttataaggatagtataaccaaaatacatcatttattccactaggtgtgtctgcatttaggaaatatgttaaatgcctagcatgtaatttacatttattatttctgatcttcaaaaaaatcttacaaagatgtaactccacaaatggagttacctatcaaaataggttaggaaattgatgcttaaaaaaagctttgaatagtgtgggaatgttatttttcttcttgacatataagtgataattctaaataagaataggaaattttctgtcatccatgtcccaaatacatttcctgttttgtcctctgaattattctattcatgtttattttgatgtaaataagaattttaatggtgttaaacttttcgaagaacattaaggaatattccatagctaagatattaagatgaaaacaggagtataataggaatctagtctgtgggacctgcatatgctattttctctctattactcagttttctcatctctaaaataaagatactttcaactttccatggggtggctaaaataattaatgcatagtgtatgtgagaaaagcctccactatcacatagagtgttagaggggaaagactccattcaccttcttacacaacaggcattcaataagtagttaagggtaaagaaatatttacaacaacgtggatcaacactcttccattttgcattatatttataaatgataatgtaatcttaaaaatataagtcaaaaaatgtagaatgaaagtccatttttacatttggtaaagatatttggagtttctggaagagatgatatataattttaccaaccattctagaaaatgacttttttgtctcttgataccagagataggtccagaggtattgctgtggatgttacaaaaatagagtcaatttttgcgaaccaaggatatttgaatgctctcatttaagtcatgtttattacattttatgggatttgtcggttcctagaatttgaatgaattattggatggaatttagctaatctgtgttccggtgtttaagcaggtcagggcggcttatttgtaatcattaatagtttgtttggatctccacatgtaggctagatgcagtatgccttctttaggaagggcctcttaaggaatatctttttcaaacatttattttaatacttttttatttttatgttttattatttttcttttacaaatcaagtctttatggaagtaagaattcgtgttacaactgattgaccttagttgtgtgactcagttatctcttggcatacctgtgtaatgcttagctcacctgtgtaatacaggtgtgcttaccttgttcaccagtaactattgccatatagcaaatcaactcaaaacttgggagcttataaaaacaacattcgtttttcttattatctcttttgattctgggtctcagatgggttcagggcttctcatataggtgtaataaaatagtagatgaagctgaagtcattttgaaggcttcttcactaacatgcctggtggctactgctggaacttcagccagggcagttggctggaacatgtatatgtggccttatttaatctgcagtcactcactaaatgctggctggattccaagagtaagtgacccaaagagtaccaagcagaaactctattgccttttgtgacttagtcttggaagtcacatagtataacttcttccatagtcaggggtccatcctagtcaaggggcagaaacataaacccaactcttgatggagaagtatcagtgttacatccgaagaataacatgtaagatgaaacatattgtatccatcttaaaaaaatacaatctgtcagaacttacaagattcttctgaagaatccaggttagttgggaaatgtggctagcatggtgcctaacaggtgttcaataaagtgcactctacttactgatgactgtacttgttttaggtaagcttgtacagatcttcaaatatccaggctcctgattaagaagtttgagaatgtccttgcacataagtgtcacagagtaggagccgaaatggccacttaattgctttctagcacaaatgaaatttcaaatccatttggaaataatttgtatgtgtaatttaataccaagaatattaagtagacactgaaacctctacacctttcattttacaggtgaagacactcaagctgagatatgctaagtcatgtacctaagattacagagcagaaatatttggtctaggatcctgatatcctgaattttgttaaacatgatgtcttcttaaggattataattattttaagctaattcatcacactgtcacattttctgtagggcgatctctagtttctacattcattaagtaatttgattttcttttttgcattaattttattacaatctattttgttttcagaaaatattttaatatttttaatcttttctctttaaattattaaccttatattttaatgaaactatattcaaagtgttgtaacatcataattaagatacatgacaaccatgattgaaaatgaaaacttagatacatttctttcttttcttttcttttctttttttttttttttttttttttgagatggagtttttgctctgttgccccggctgaagtgcactggcacgatcttggctcaatgcaacctctgcctcctgggttcaagcaactctcctgcctcagcctcctgagtagctggtattacaggtgcctgccaccacacccagctaatttttgtatttttcagtagagacgaggtttccccattttggccaggctggtctcgaactcttgacctcaggtgatccagccgccttggccatccaaagttctgtgattacagatgtgagccattgtgcccggccatacagatatattccttaaaatgtataattagtggatacccatgcctaattttaatccctgctatagaattctggcagcacatatccttgcatattgtggtctttatctacaaataatatcagtgaaaaaatgtaataatgcttggttaatcaacataaacttgttaccaaacttgtagattaacacagagcctcctattatgtcatacatgtgttaaatccatgtgggtctcaaatctactagcaaacttttttgttttcactaagagtttacccccttaagcatgtcaatgtaaagaaaaatattaattcttttgaagagataccttatttagtaataattagagtgactttaaaatcaacacataattaacggtcacatattttgttcattataaagtttaatagaaatacagtcattttttaaattatgagaatgctatcaattaaatctttggggaaataaactatctttggaaggattaatgatgagttgatggtatcgttatgaaactcctcatttctagatcatctgcataccaattcagctacataaagtcatgttcctcttttatgtgtagcaaatccagattttcaagcttagcattttaaatacttacttctattaggtaacttatttaaagtgtaatgatgccaatgatgagaggtatgtataacaatgggattacttcacaataaaacttacttatagtgaatatttatgaaaatgtttattaggtgtctctgggaactctggtcaatttaaaatcttagtacattttatcttcattataacatgtcccaaggaaatttttggctgaaagattagcattataaaaatagaactttaattagaaatttctatattgtgtgtcagattgctaaatccagtggcaattatctgcttcctaagatatgtagtcctctttctgaaacattcaaatttactttataatacctgaaaaagtcatttcaagaagaaatttagatcattaatggaatgagaaataagattagcccgtggattcttctacttctactttataatttaaatttcaggtgagctaggtgattaaagtcattttaactatttggtacctcaaatagttcaggaacaagtatgccggaagcactgtagtattaccattaatttaataattgcttattggccacttgatcctagaagccaggaataaatgtgaaataaagtttttataagctcttaaaaatcttaacatttctattgcttcatagagcatgattatagttaattatttatggagtcaataaaggaatttagtatggcaattcttgcatcatgtattggttatgatgcttttaagaaagactctaaggaaagttagaagtcaaatataaagttgggaaaattattagtaacatttataacatacgaaggattgatagccctcatatataaataatgctgataaatcaataagtaaaactagaatgccccaataggaaaattcataaagaacatgagccagaaaatgacaaaagcgaaaaagcccatatatcattaagtatgtaaaaagacataccatctacttaataaaaaaatataatataaacaatcaaattatttttaactaccagataggcagattgaaacagtgataatactgataattttgcagaacataaagaaacaggaaacatcaaaagttgtaagagggcttatgacagaataaattgatgctgtccttctggtgcataattttttaatcacaaaatttaaatttaggagtaataatctggtaaatgaaatgatgtaagacatagttaaaacaggttttcaaagagggaaagtttaataaacacttgaatagtgatcaccataggattaataaaacttagggtaaatatttttaatgcaatatcatgaaatctttaaaattcatgctatagttatatacttaataccatgctgtaaagatagcactgatacatggttagattataagcaaagttttcaaatagagtatatatctgtgtgttacgtgtgcatatatatgtgtgtgtgtgggtatatacatacagcaatacacatatctaccaataatactaaacacttacatagggagtatgttctattcgaagttatacatatgggttgtctctaacagcactttatctctgtgcctatttccctagtctcatcctcataactagaactctaaatccattatgtatacacactgtgtgtgtgtgtgtgtgtgtgtgtgtgtgtgtgtgtatgtatgtgtgtgtgtgtgtgttttgtatgtgctataacatttcacttttgcttctatggtgcaatttttttcattggaaatttaacaacttactatttttaccgtcttaatttttaaacaaataagtcattattactcagtggcccttgaaatattgaggcaatatgtctcaaaaacttcttgttaggtgaatggttacattcactccttctttctttctttttttttttattatacttttagggtacatgtgcacaatgtgcaggttagttacatatgtatacatgtgccatgttggtgtgctgcacccattaactcatcatttaacattaggtatatctcctaatgctatcccttccccctccccccaccccactacgggacccagtgtgtgatgttccccttcctgtgtccatgtgttctcattgttcgattcccacctatgagtgagaacatgcggtgtttggttttttgtccttgcgatagtttgctgagaatgatggtttccagcttcatccatgtccctacaaaggacatgaactcatccttttttatggctgcatagtattccatggtgtatatgtggcacattttcttaatccagtctatcattgttggacatttgggttgattccaagtctttgctattgtgagtagtgccacaataagcatacgtgtacatgtatctttatagcagcatgatttataatcctttgggtatatacccagtaatgtgatggctgggtcaagtggtatttctagttctagatccctgaggaatcgccactccttctttcaatagaaaattattgagtaattagtatgtcctagaaactaccataaagctctttaccatgataacccaattgtggtttggagatttactaatgtatcacaatatgcaggttaaagactgctgttagaatgtgttactagtcacttaatgtttattaagtgccatctaaaccagtcattctagatctggttattaaatttcactatgttataataactttttcattccaatgtgcactgtgaatcagcaagggaacgctattcattgtggtcatttggaaacccagcctgatgaaacagctactatctaggatactcccagtcactccgcaaagggaaagaaaattctgaaaggtcttgtgctggcaattaattgcttgaactggaagtgacatatctgcttcagttcacaactcacgagcacaactagttacatggtctcacccaacttagaactaagaaatatattcgtattacatgtctcaaaggtagaaagctggaaataaatatgaatggtgttaataactgctacactgctaaatttatgttgtcagaaacatctaaggacaaaatgaactatgaaataaaaacatggccatgctctcaaaatttgttttttttgatatgaactcttcaagcataaaaaattaaattccaaaattgaaatcataaactaagttaacttgctaaaattcatggggtcaaatatgtgatatttgaatactcgctaatagaaatgtctcaaaatgcaataaaaggctttgggggatagtgagccctctgtcagagtagtgtttaagtatagactacctaatgagactggttgtaaaaggcagtcggtcacgggacacatggcttattaatatgttcacttactatgtactggaaccatatagctgtctaagatgagctttcttctcctttgcaagccttaaatccataattctaatcgatgggtcttgtggaatagtggtaactattatggaatgagagacagtgaaccaagcatggggaacatatatggccatattattgcccttaaggaatttacaaactgagtaagtagagaagatgttgagagtagttctaaatcctgaaataatttcactttacactcggaagaaaatccaaaacaccatcgtgatttgttccctataggtatcctaccttctttcctacccttaaccccatttctcagctccagatacactggcctactagcttggcatcaaatacgccaagcatactttgagttcagtgactttacacatgtatctccctcttcctggaagggtttttcccccagttattcatatggcgcacttcctttaccttagactgcaaagagatcttttctgactaccctatttgatatgccactaccattgttctgtcttctttcaaagctttaatttttttcctcattgtagttatcactactgacattacgatatttgcaggtcgtttttccctaatgagtaaaaactccaagaggaaaaggactagaatatatactaggtacataaagcatattgatcaaatgaatgaaagcatcacgtttcttttatatgccccagtttgcgattgtattgtatattctaagagttgagtgaacagcaatacttaagggagcagctgcccgtgaatctaatatattgttcagggttttgaagcaggtcctgcaatataaaccctgctgcagcacagttttacgtcatcttccttctcttactatgaattattaatcccatcaacctcatcgtaatagaagagttacgtataaaagaatgagtaatacaaggtgggatatgctaccttgtatttcaaacacatgtttgatttttccaaactaatttcagtgattggagagatcgtacaaatatggatatataaggcttattactagcgtgatgaatgggatccaagaatcggcagtttatgcatcctacaatggtccatcgactcgtactcaggaagatttccatagagtaagttcatcttgaacagagctttttacgaggcttagataagaaaagaatgaaaatactttaggtgggacatgatttcaataaatggtattactaaagccatggaaataaccctatgcttaagagatggacgaaacagatattttggaatctttgctgctctaagattctttatcgcctaatagcaaaaagattagataaagaggaaaactatcacttactggtcaaaggtagaaaatgtatggagaagaaatcagtgaaaagtgatgtaaaatatgtaactaggaaataaataaggctagagaaggtaccagaagtagatgagcagctgtggactgttacccccactcccgtctcaaatataaggggcgtagcctgagggttttctgttcaaaacaactttgactgtgtgtgtgtgtgtatgtgtttctgtgtgtgtgtgctggggagaaaggttggggtgggtggaaggagagttgatggggggagagagacagcaaacaatgttgaggctcaaaatgaaatttctatttttaagtacattttgaaaatattggcttatataaagttttcactaatttttgaagtaatattaaatatatgagtcttttaacaaatattgggcattcataatttgagatgtaatacctaattttgaatgaaataattgtttttctcaataaattaaagcataagaattattggagatttttcaccattccatgagaggaaattttagtagtgtacaaaagtagattaagatttatagacagcctttggcttggagaaacttactctactcagtgcctgaggaccagttgtgaagacagtcttatttgtgttggacaaaaacgtcaggcctttgaaaaaaacaatattcaaagtcagtattttgattgtatttgaagttcttagtgatgtttctaaacgttacgttaaatattagaaaaatattttcatggtcatatgtgtcatggtcataatcaatatgatagcttagttttttaagagtacaaaaatttaggccaggcacggtggctcatgcctgtaatcccagcactctgggaggccgaagcaggcggatcatgagttcaggagttcgagaccagcctgaccaacatggtgaagccccgtctcaagtaaaaatacaaaaatcagccaggtgtggtggcacatgcctgtattcccagctactcagaggctgaggcaggagaatcgcttgaaccccagaggcggaggttgcagtgagccgagatcgcgccactgcactccagcctgggtgacagagtaagactccgtctcaaaaaaaaaaaaaaaaaaaaaaaaaaaaaagtacaaatattagagcgaaacgaacatcaacaatttagtgaacgtttcttgtgtcagtttcagtctcagtatactgtgaaaagggaatgaaaaaaacatgtttaaagtgagtaaaattgattgacgtggtctttttcagcatgttttaagtgtttttcgctttgccaattaaaacttctattttattatttacctaaatctaccccccagtaaacaaaatagtatttccattttcataaaaggcagttccttttctttttcatcacccccatctttagagatctttgactttctattttttctcactgcctgacattaagattccttctgttaaatgtttttgaattacatttagttcataagaaatgtttcccctagactttaagaactttcggacataaaatttttcgccaattttgttcattcacttaacaaggacaaaaaaccagaaagagttgggtgacaatttccattcagtaaatgttctttactaaatctgaattgcatattgtggaatcagtaaatgtcaagaacaagccagtctatcttttcacaaaaaaaaaaaccaaaacctcgttgttactattttctattgtttttctagtttctattttatttacttttgttctgatctttattctttccttctattaacttcccctgtggaataactccaattataccatatcatgaagcaaaacatataactgtagaaatacaaaaggctcaactataacactggactaagcattggctgatctcccctagcatacctagcaatattaatcactcagataattaggcactgtcctatatttttgtaagatttataactttaaatttttcattacatatttttttccagtgactttgagacttatcttactttttagtgtgttaggtttatcagtggtgattttattgttatacatgacctcataatagttgttttttctttcagtacatttgttttatgtttaaatttttatatttacatgattaacttatgcaaattatatgtttaaaaatctgttttattgccaaagttgtaaggagggagtcaaagttcctagtcatttatttattagaattattcacaggagtgacaacgtgcgtaagtttatgttgaccagtcaaattttctcttcacaaaggacagaatgtgaaaagcacagattcttttttggtcatggggcagggaaagataatataactctgactgtgagagaatgagggaggagtagagaagggatcacatgttagtgtttattcttgtttcgtagaatgtactcatattggcctggacagttgccctttgattttaggagattaaaatatactaagcatgtaggcacccacccatacacacatacacaacacaacacacacacacacacacacacggacacgcaaacacagttgctaatcagtctgacttttatctgtaattctggttctgctacttactaaatgtgtgacttaaggtatattactgcacattgtgctcacttttgtctatttggatattttagttgacatttcaccttacataaaaaatgtgttgaaaattgttagcaagaaacaccatagggcatcatcatctgctttgtgatacataaaacatttgttaaaactgttcttttcttctgtaaggacactcaacagatttatcaaataaccattttaagtgtacaatacagtattattagagacaacgttgtgtagcagatctttagaatttattcatcttgcatgatgaaaattttatgcccattaattagcatttccccattttctcctcctttcagcctctaaaagccaccactctaatctctgattctctgagtttggcaattttagatacctggtgtgagtagaatcatgaagtatttgtatttctgtgtctagcttttttcatttacaatataccttcaaggttcatccaacttgtcacatattgcaagttttccttctttttaaagactgaataaaattccattgtatgtatttaccacatcttctttatccattcagctatcgggcatttacgttgttcccacatcgtgactatttttaatcgtgctataatgagcactggagtgctaatagctctttgagatcctgatattttgctctttttttgataaaatggcttcataatagttatttcctcatatcattattctaaaaattgagctgctaagtataaatctgatcacaaagtaaacatgtaaatattattttttaatcacacatgaaggatttttatagtaactttgtgtaaaggtgggtattttcttgtaagttattggaatctattaattttaagggagcattccaaattttaagaggtagaaagaaacaaaattccagtgcctatgtagtttatttcattttaatttaaattatgagatgattgaatagtgttcacattagaagtataggaagatagtttagaggtcaacttctttggtcttgtatttctttttgttaatgaaattaatgtgtgttcagtggaaatatgcacatgtgaatatactgttagtttctttaaataaattatatctccaaatgatataataccatgaagccactacaaagttaagatataaaagagtttaattgcatggcatatttttacaatacattaaataactgaaaatgtagctaagacaacattgtgactggttttgaaaaaataaattatttgtgtggttatacatctatatatgtacttagaacaaaggttatattcagaatattttacactagactcttttcaattaattttataggagtttcatttctctgaattttcatttgtcagtgaaattacatattttaaaacatgcaaaaataaataaaacatgtaatttaaaaatgtaaaactcttttacatatatttttaaatgtcaataaatgaaaaactcttacatatatttttcaatttcaataaatgaaaatcaggaaaatagtgacatggtcttcaaaaatcacaatttaatagagaaaactgaagataggaaataatattctaattacggacaatgattaacactggcagaactggtaaatagtacactataaaataaaatactacattaagatatataatcagaggacatcatacctcaatacatatgtgtttgttttgttttttaaagacacgggctaacattactaattactgaaggatggagaatgttaactgagcttgtaatgataagccggtgcagataaataaaatggtataacaatcatcacagtttataaaaccctaagagtttgttaaatgtgcataatagcgtccacaatcccgctaacacaatctccaaacatttttgtgtacacatagtgtaaaggatccagaatttcaatcatattctcaaaagaattcattgccccaaaatggcaatgaaattctgagaaaaatagggtatggtgagactctgaggacttggaaagccaggcaaaatactacttatttctatggtacagacagataagtcctttatgttatattatccatgttgaaaatctggtagattgggaagcaggaaagaggtttcatgtttcagctgcaaactttgtgttcgtggaaagacaagagcaagtgctacataagttgagccattcccagaacaggtagtgaaagggctctattgcttcaactgaagaatgtgttatgctcttatgtataagagggattcttcacaccttataaaatgttcatatcccttttacgtgctttgtattatttatgccccagtgagcttacttgtgagataaaagatgaaatttttaactctgtcaactaaaaacaaccttatatatcttgaatgagttgaccaaagtagtatggttagaaactgataggtatgtcactcaacccaagttttccaatttctgggctctgaatcattttattagcctaagctccttcctgagtgttgatcttagataatgaaccagttactcttagataatgtctgtgatgatgaataatgtcacaaaaattactaactgatattggacaatcattatataacaaacattgctgtaaacacttttcatacattaattcaatgtttataacaaccctattgagaagattctgttaatatatccattttacacttgagaaaattgataagctggttaagaaatctgtgcacagttatgcacatgaaaagcagctgtgccaggatttgaacacacacacaatctcattccagaattgattctattaacctgtatgctaaaatgacacaacatagagctttatgaagctatcattagaggaaaggttgggttttcataaacacacttatgcacacacttcatgatttactaaaagtggatgaatatataagcaatataatgacaaattataaatcaggcaaccagaaaataagaaggtaaaatacaggcaggtttaaaataaaggttactttataaaatgaaaggtgaagtttgggaactggtaatgaggaagaataattgctgtgaaatctatcaacagatgacttcattaatcttttttccttgaaagagattcagatgatattaccatctctttcaggagtggaagagagagaattggagagaaatgttttaaagattctgatttatagcaagcctgtgaaaaaatggtgcattaaattcccatttggcatcctagttgtagtaagataatacatcctttctaaaaattccatttgatgaataagcaaaccaattcaaaatgactccattttattgataatagcatcagtgtcattaatgagaatgctttttgactaacagcaattaactagatttggtgaactgagcaattgaacattgaatttgaaatcagaacattcggcactgaagatgatataagtacatattagaatgattgttgattatttaaggatttattaagttgatgaagaacattaaagtctattatatcctgtattatttaggatgcttggtttcaaatgtactcaagatacaaagagaatttgttggctaagtaaagagttcaaggtttgctcaagggtttaatacagagttttattatggatttaaggagaagtctttgcttctctgttaatctaagcctaccctccataacttttcgaactcatacagaccggcttccctcagcagatcttggaaactcttttcccttgtttacagctaaatgtaaagaatatatctttacccaaataggaaacaaaaggtctgagtttctctctgcttggaaactcttagatcatatgcctggcctgaacacctccctgaagcaaagtacatagcagtatcccacttggcttgcacaaaaaccgagcgcatatctagaactgagagtaataacaatgctttccaaatcaccaggctactgtgccatcagagagtagaagaaaggatattgactgtataattgcagtgcttactacagtcctcctctttgaatatccaacattgctatacacccttcatagcatatattcactttcaaagatgctcagactcctcaaaaagagcaagtataaaacattatccagtgattgcattcagctccaaggttgggatatctgggtgattagcagtccctttcaattagtctttatgatccatccagtggactatgactaagtgaaaaaatttgatgtccagtactgctaagtaaaaagttagaagggcacatcctgattaaaactaaactaaatttataaaagaaaccaaattgaaacagatattatatcctgcactttcagagccttcctggtgatttttccttctgttcattataaattttgctaaatacttgtcttcatcatgatatctgaagttgacatattttggggttttgtgttactttattattctacttattgtgttgtttaaaagtcctggtgcttgccctaggtttgagtgataacaaggtgtttttagttagacctggggtttctttggcaatcagatttgtttactatttataggctttcagtatttgttcttatcaattccatgacccagtaacccaaattctatgatttggttttaggcttcaaatgttaacctcttttgacatctttaagaggcctctgtgctttgcacaatcccctgactgagaaaatttgcagcacagggttggggtagagggcatagccaatctttgagtatatctttgaagtatagattacatagaagctgcttcttcatgataggagggatcgtctactttgtcacaaaagtgctttagggaagcactatagttgattttttttagtacttaagtcttacattctgcctctcctgtctctgttcatacaaacattcgatttggagtaaaaatacaaattggcttttccactcatatcaggctccaaattatcagcctctcaaggcgttcacgttataagccacaggcagagagggcttcttcagacaaagctatattttcttttttttctgtacttcaaaaacaagtaaccattagcatgaggttttttctttcttggtttaaagaggccagtaggtggcaacatttttgtttctatcaaatctcctaatagtgttggtactcgtaaggcacatgacttaggataaaatagaccattgtttaatcaactgttttttaatcatgtaccaagtatcattttgagttggggtgggggaggtttatcatccttgtcttctcataattcagcctgttccacattataggatctattaactttcaacaacccacttcctgataccaaagtccatataaactagaatgatgtttggtacaataatggaaaactcttctcaagaaaacttgaaatatgcagacacacacacgcacatgcacacacatacacatacacacacatacagaaaacatccacattggagcagtaacatgtgacatcttttcttccattaaagatttcttgtaattaaaccttgggaattattggcttatgtaacagaaaattccaaaggaatggcaggattctggtaagcctttaatccaaatattcacattgtcatcacactgcagctccgtatctcagtggctcttttggctcttcactcttccgttatctatgccaggtagttatttctttccctatacagttttgttatgatagatggctgccagaactgtaacatttttttctttgcttatgtcaaaggaaaaataagtactttttttctcagtcaagcagaactctggacaccttctggttggaacatgttaagtcatgtttccacagttaatatactgtgttaaagcataaaatgttgtagttggatttttgttctatgtccctggcaaaaaggatttatttaaagcaatcaggacttatgcatgggattggggaggtgattaattgctcccaagccacaagattccttcataaggatggaatatagtttggaaattattttatggtagtatttgaaagagttcagtgttttcccatgatttaataatataaatccttaatagaataaaatatatcatgaattgcaagtgtatttgaaagtgtgtgtgtgtctaattttattggatccagaaaatatgctctattttttcttggaaaatgctgtgttttatatccactgcattttttttatgttctgtacatttcagttggatttctttcaaagggactgccctctatcaatcaaagtcatctttagcataggttaggctattactgatgaatcaaatatttctagagcaatactttaggacctgtcccacaactaatatattcaaaatttagcaaaagtttattgagtacctgttagaagcaaaggactatgctaggtgttctcatatacatgaagataaatatatgtcataaaacaatgacaaattggctttcagaatgtgcttatttccaatatcatcatatttttcttttctgtcatttttcattttatcatataaagaccttgaggggtgttttttcagagaaacaataaaccaatgatggatgagcccacttgagttagttacatactatacagcttatataaagcataagcatataaaaagtatatgcatctactttcatagtttggattgttatttaaatttggtggtattacattttcttctcacagatgactggtcttaaatgtgtactatagaatttacagaaacaaaccatagggtttaataagctgaataaaatgaagctctttatctggttagattactttgtaaaggacaagaataggggagcctcccaggtcaacctgatgtatgattttccatttttctaaataagttttattgacttttacattttaatggaaaatgagtaattagcagaggtgcagattatatttggcagaaaatgattataatatttttatcagagagtaaaatatatgcagaaatagccaagtaatctgatttgttaataataatagtatcctgattatggttttatcttttgttttaaaataacatttatatagggtcaattttgaagataaatgggaacctggtgaactctgtctctttttctcagagtgtgtgtgtgtatgtacataaatttaaaaatcgaagttatagttaattggaataagaagtttgttgaaaacagtttgatgtctggtaattgagaaatgtttatgaatctgacataatttactaaataatggagagagatacattattcagaacattatataagtacctaggccaaatttctgaaagatccaaggtgagagatatatgtataattatcttggtggtaatttactcatgagtagtattgacattgagatattaacaatttgtaccgacccacttgtagctgagtatatattcttaaattgtgttccaacataaactgtcatctatattggtggatctttgcgatgctttgggttaggtcatcaaaacctaagcaaaccctggggaatgtactttatatgtatattattctcccactcacacacacacacacatcctcactgtttagaagtacacatttgtcaacattacaatgcttttggcattcacagaatctgttcaaattagtacagtgttcactactgccatagcaggaaaaaaactgtacttttgaatcatttatttttaaatcatttgaagtagaaaattctgacaggttgcactgatgaatctttactaaaaataaaggtctttgtttacaaataattacatcttctcaaccagtggtttcatgttgcttactttcttaaaattccaaatagaacaaggtttgcaaaaatcgtcacatatacatgttatcactgttgactgttttatgataatttaggtagcattcattgtacacttacaatatggcaggagcatgtggcagttacttgaatggcaatatttatgaggtttaccaccaatcaagcttcccactatacagattaagattaagacttactgaagggtccttgtgctagtaagaggcagagtaaaatagacctaggcatcttgaattcctaaacctatgatttctaagttatgtcttctggcctttgtgttaaaatttatttctaatcaacagtgatacttttaaaatatacataatagtgtcatatgtgaaggtcaaacactagtaatttaatctgtcaagtacttactgatcatctaatttgtgttaattactgggtgttacttgacttgtcctcaggttctttatgcactagagaggagacagacactcttacagctgctttaagacacagtagagataggaagtataataacttttcatataaatcctctgggaccataaattatagcttcataaatcttggcttagcaggtagcagaaggtataactgaatgatgagccttgatagtcaagtatgatttttataaggagatcatcccatagaaatattacttcactttgtggagctaaatgagaaagaagcacgaatcgtcagttcattttgtgactgttcgtttcgtgtgtagggcatatggttaggggaggaggagtaggagaggcggctggaaaatgaggttgaaggacacattgtggaggattttgcatatcatgctcaaggagatacattttattcagtaggcaagagaagggcattggcaggttttgaataacaagtcatgtgtttcaaccctgggacttatgaagctgaatggagaggcactttgcctttaggaaggattgccaaaaaaaaccaaaaagggccatgctgagttgaaagtgtcaaggttgcctccagaataagctaactgtatttggaaatcagggtttattatcaacagatcagttaagaccagtgatagaatcgcattgcaggggctagggtggagagagataacagagtaatcccaaaaagtacatgaaatttcacagagaaaaaaagtacaatcaaatttgaagaggttcaaggacagaatatttgattgattgttttgttgatcgatctatctatctgtagggaactagaggtgggagacatagttaggtacgatttaagagtttccttaggaaagtaccatcacataacagatatttaaaaagactttaaagaaggtagttatgttaaacagtgctgcaaatgaattgaggaggatgcaggtaggggaagggcaactggatctactgttttagaagtatacttgtgtgctgtgagagggatttttaagtataagtgtggaaaacaagaaataatacatagaattacggctgattatgggaaactggaaggaggaaagtttaatcaattctgaggttcagtgatgaaagtaaggaggagatgggatagttcatagaagaatgatgttaatatttcagattgggagagaattaagagttctgataaactcctaattttgatgatacactctgtggtaggaatctacagtacaccgtaaattcctgtgtataacatacaatgtgctatataaaatatgtggtatcaacctataaatgttgatttttcaggacaaaaatgtccagaaaaatgtaatgaacattcagcatacagcttcgataagaagttttaatcccattagtatttaactaacatactcccatttttagtaagtgattattattagtattgattcctacttaattctcttcaatgccgtagtctctgtattttcctcccttcattaaaaaaaaaaaatctttcaagttcaagttttatcagagagcaagatggcatagggaagagagcagagaccatgacatcactggaacagtttaacatgatttgattttataaaacatgataaaataagtatcaggcggcattttgttttaaaacacttgctgctggaattccactattcatatgataacctgctgatcagtaggactctgtctcctgatgccaagtttttagcaccttctacagcaatgtgtgaataatgcagagatgcgaaggaaccttttaagccaacttgagaaacaagccctgtcaaaaacatgatttctcatgactgaataatgcaacagactattccatttagaaaaacatcagtaaatagtctgagttttgatagtgattacattcttacacttgaggtaaaaaaaatattcttgtctcagtccacaaagttgataggcatagggacatatgagtgtatacactgagggtgtttaacaatgaaatgtgattcaaaaatataacaagatttgataagcaaatgggccagcaatttgaaatgcttcaaattatacttaggctctgagatgaaatgtatgtcatttaagtgtacttttttttttttcccgagatggagtctccctctgtcgccaggctggcatgcagtggcacaatctcggctcactgcaacctccgcctcctgggctcaagcgattcttctgccttagcctcactagtagctgggattacaggcacctgccaccatgcccgactaatttttgtatttttttttttttaaatagtgacaaggttttgctatgttggccaggctggtcttgaactcctgaccttaggtgatccgcccgcctcggcctcccaaagtgctgggattacaggcatgagccacagtgcccagccttaagggtatttttaagtagctcatcaagatgcaattagatttaccattatctgacttgagtagaaaactggaaaaaaaaaaaaaaaaaacacaaaagcagagaatggtgagaacttttaagcgaaggtgtagccgacccagtgtcaaatagacaaaatgtagaaaagacaaatattatacatgtgatcttttctgtcacataatgttgacccctaggatttccatcttatgctttcagtaacagtaaactacaatatttagtgcagtattagatgattatcatgtcctaatacatttcctccataaaactagaagaatggcacttaaggtccaatgaaatatgatggttaaatataatatttgtactcccttgttggtgttgcttaatgcatttcttaatcctccaatttatcgtgtcacacagcactaagctcaacaatttattcataaagtggctgcaaatataatttggaacaaacttttttttgttcaatataatttatttatttattgcttgtataatcacacaaaagtgtgagttccatgaggacagagacagttgtctcttctgtttactacaaacgtcttccgggccagtaataaccagaagttgttacctgttaaataaactgaaagtcaaatgtagggtgatttctacgcatgaggagttctagagctcattgatgtcatccaaggtttaaattcttagtgtaatgtattctaggctcatccatgttgtagcaaatggcaagatttcattctttttttaaggactgaataatattcaattgcatatatgccataatgtctttaatcatttatccatggatacttaaacgttgtttccatatcttggctactgtgaacaatgcttcaatgagcatagaagcccggatatctttacaaggttgtgttattttttcctttgtgtatatgcccagaaggagggattcttgggtcatatggtggttttgaattccttgcctcacaaaaccttgctttgtctttgcttgctgtttttttttttttggagacagattattgctctgttgcccaggttagagttcattgacccaatttcagctcactgcacccctgcctcccaggttcaacgattctacttcctcagcctcccaagtagatgggactacaggcacccaccaccacgcctggctaatttttgttattttagtagagacagggtttcaccatgttggccatgctggtctcgaactcctgaccattcccatcaatgatagactggataaagaaaatgtggcacatatacatggaatactatgcgaccataaaatagaatgagttcttgtcctttgcagggacatggatggagctggaaaccatcattctaagcaaactaacccaggaacagaaaaccaaataccgcatgttctcactcataagtgggagttgaacaatgagaacacatggacacagggaggggaacatcacacaccatcgcctgtctgggagtggagggcaagggtagggagagcattaggataaatacctaatgcatgcagggcttaaaacctggatgacgggttgatgggtgcagcaaaccactatagcacatgtatatttatgtaacaaacctgcacgttctgcacatgtatcccagaacttgaagtataataataaaaaaagacacctaggaatcattctcaacaactgtactgtccttgtcatatttatagtgcccacgtccaatacactctaagatcatatatgtcagaagtctgtcatctccccctctttccctacttctgttttgttgaagtcctcagtatatatctcatcaattcattttttcaacagttcttgagttcttatggcagcagtcaggttctgactattacatactgtcattcactggatatctaactggtcttgctgccctcatcttccatagatcattctccacactgcatccagaatgatctttcataaatataaatgtagtaccaatgttcatggtttgactgtcaattcccccaaaagattaccgggaaaacacgttgatgaaacaacgctgagtgtattagacatggcgccataagggaagacactaacttgacaaggtcttagtagtgtgtaaaaattcctacttctcagttcatatttcgcttcccttttcaatgcttccatttcttcttggacgtgttcttatgagagcacatatattttttgcttacttgtaggtttcctccactggactatgatttccttgagggcagctcttttattctttatatccattgtgatctaagtgagtgattaatacatagttgatacatgaatccacaatatgtgctcattttagtattaattgaatacataagacattgcttcttaagtgtgccttaattggcacaataacaaaatttgttgaggatttactgaagaccaggttcttccatgctgtatgtatattattaacatgtttaacttagcttaccaacattaggagtttatattcttgttattcccattttcagacgagaacactaaggttcagtggtacagaaaagaatttgagtctagatattttgattccacagcccatattcttaattctcggtacactacacttctctagcatgtttgataatatattggtaacactcaattgccaaatgtattctgcatatatcacaaccagtatcctgatatatgttggttgggttatgaaatgacacataatttgttcaacaaacatttattaagtttttacagtatgctagccacaatgtgagattccttatatgtactacctaaattaagtaacttaagtaaatgtaggaggatttgagacatgcatttactttcccctctttgatttctaaggcaccacacattccaggttttcttcctgtttttctagcatctgctttgattttaatttgctggttcttccccatcaacacaaattcctgatatgacagtaaccaggggttggttcttagaccacattcattttctcgatgatcttatctagcctcctggcatcaaatactgtctgtaagttgatgcctcccaatgtttacccccagctcagagctttctgccaaactccaaacttagatacacaactttttatacattcctagtcaattcaaatttaccctatgtaaaactaaatttactaacacccacatctgcttcgtcaatagtttttcctgtgtcagtaaggtttcactatagccttccagttgccccaaatgaacatctttgagtcaaacttagtcttgttctttctcacacctgatgttgttgattagaaaactatgccaggtttggccggatgcggtggctcacgcctgtaatcccagcactttgagaggccgaggcgggcggatcacgaggtcaggagatcgagaccatcctggctaacacggtgaaaccccgtctctactaaaaatacaaaaaatttgccggccgtggtggcaggtgcctgtagtcccagctactcgggaggctgaggcaggagaatggcgtgaacccgggaggcggagcttgtagtgagcggatatcgcgctactgcactccagcctgggtgacagagcgagactccatctcaaaaaaaaaaaaaaaaaaaaacctatgccaggtccaccttaaccaggtatatatccagaatctgatcacttctgactacttacatggccaccaccatcacctctggtctaaattagtgaaatagccttttaaacaagcctgcctgctttggccttgccttacctgtaatccattttgtctgccagatggtcttgttaaaacgtaaggcaaatcacatcactcttctgctgaaaaccttcccatgccttgccagacattcagtaaaatgcagtcctgctgttttataagcccatgcacaatcacctcctcctttctctatgtttcttctctggcttccttttccaccgttgttaccgtctctcattccaccgcagtcatagatgcctctacctggaacacatttcctccacatactcacatgacttactctctcatatctttaaatctttttctcaatgatattttccctagtactttcaattccccttccttgcttccttttctccataacacttacatccttctattttacttatttctcttgattagcatgccttcagtgacatgattcactgaatgagaacttagatttctgtctgttttgtatatggctatatcatcattgcctaaaatagtgcctggtcctttgtagttgcttaataaatatttgttaaagcaacactatttgtactaagtgacagagccagaattccatatgattttcaagctcttctctataaaataaatgaagttatgatgtattgaatgtataaaggctcttttgttagttgctcttctacctggcaagtctgtaattaaaataattttgtaaaaaattatctatttgaagtttttttattatttgttcaattgccagtagataggctagacaaagataagtttaccaattgattatggatatcttacattcttattaaaaagcaaaataataatggatataacacattattattttcatgattaaggatatatcacctctaatgagtagatactaaaagagccttaattttctgattcccttatttctcctcaaggcaaggatagatatccctgtgctgatggcatcgaatgcattggcaagcctaaaatcaaacaagctttctagtagactccactcaagattatcatcaatcttcctttgcaaatttggttttcagtttttgtcttcacattgaaaaatagtcaatatattggcaacaaatgtaatgcattactcaatggcaggtgatatcgctaaagatggtcaattacatgctaaaaacaaaggactttgaggtctgttggatgccaaaacctacagtcaattcagtcaatatttttgacagtacagagggaaaaatcactcaaggaaaattgccacagtatacattaaatatctttgtttatcccattttagttattttgtgtgatatctctaaatgctgttctgtatatgctgctgacaaggagcaaatttatttgtttagaaattctgcagcctttccatcctttgccttaactttcttgttgaggtactaatgagctgtgaaaggccaaatgaaagagaaataacacctccagataatctgtactctgataaactactcccagaataattgggagtttatggttgttgtagggcagtggaagaaataagcaatgttggccaactatacggaacaacccgtgttaataaatttgtaaaagaagtttacaaggcaatcacaatcctttcaaacaaatgtcatgcatgtactttcaggcctaggcacaatgttattatctgaaaagcttgataggtaggattgtattttgtcccactatttctaaatcaggaaattctaagcatacttgtgacgatttctcttttaccttaaatggcttccctattccagatttacagtttctgcatgagttttctactcaatttgcataattttaatttacctttatgttaaggtttttgaagagctgccgtactttcatatttggagtttaacatattttaatttatggacgtggcaataatttgatgacctttttagtgtaatataaagcctatatataaaaacttccaaatagaatatgtactgagtttgtaggaaatttataagtattatgcaaatcaagaatatggtagctgattccactagaggctattttgaaaatataaagaaactttgtttttaaacatagtattgattatctcactatgtgacaaaaaggtatttctgtttattctgtttctttccatttctgctttccaaagtagaacaaataagttgaaatgtaccaatgggtgtgttttaagttttgacaggtttcgggtatgattatataccaacaaaatcccagtaatatttgctgcatatttcattgtatctatattttatgtactgatttaaaatttaaaatgtgagtaaattttaaggcattgtgctaatgaaacttatggtagttcattttttatttttatatagacaagctatctgtttagaatgcaaaaattatatgccatatacaatcatattataaacatataaaattggtcacagaaatttctaagggtgaaaaagactggatgaatcaaagaaatctatccacaattctgtgagtgtatgagagacttagaatgatcacattcacataaaatataacacattattatattttgatttttaaattaaattttataaatctagctatctctgggaaatgtttcttccccttgagttattacaaaaaagtctggcaacaagttaatattcaggatttcgtgagacagatactgaattcagttcccatctctgctttttattagctcttcgaccttgggcaagtttctaacctttatgaatcaggtctcctcatagtaaaatgtagacaataatcatcccttatgttgtgaggttaaattagatgatttagtggagtgcttacaccatccctcacaaatggtaaacacttaattcactatacttcagttctggtggtaaattctaaaagaatttagatgatgaagacagcattataatttaaagcacagtctacacagtggatagcacccacttaggagatacacacgatgaactggggttctagaaggacatattataatgtctcttcacaggcttatttaagaattaagaaagaaataaactttaccaatttttaatatacaggttttcagataatttgatgtaatatatggtacttgatatcttctgtggaaaatcagagatccttaataggatgcataatgtcaggcctctctcttatttattagcgtttttggtgctcttgatgtgctgctatgtctatgaacactaaagtgtgtttatagattatgttatcttaagtagtagaatacttaaaatctttgtcagcaaaatcagagtaacctaggaaatctattttactacacagaaatgttctggacatctcatggcaaagtagttgaaaagattgagttatgtactttatttttgaaaaggtcaagtgttacataaatgctgaacattttcaggttggcaagtggctgtgagtactatgttatttctcaaattatttccaaaagcagaaaaaaaccttcaatctttgaaggagaagcttctgtattaacaatattaagaaagagactagattttataagacattcatgctatggagagagcattttaaaaatggatatttggtggtagtcccattataaataggtcagttataaaatattctatacctacagaaaataaatggaaagaaatgtcaaatctgtttaaaaatattataagtgaaaactttcagtgaggttttgtctctgtttatgactttaggacgtttactttctatgttcacctcacttagggttctgtttcgcttttctgctcatgcttccatttcctcagttggtaatatacacatatctgtacatatcctttaatcctcttctagtatcttcaccaaatcagaagtgattgctcttatcacttagcccaccctgattttgagttttttttttacttgaaaatatgagaagtaatgttagtataacaagagatggaaacttatcaaaaggtttcatacttttatttttctgaaatgcaaaagacttactgcgttcttctcagttctatgaaccctaagatcaaaagctttagttgtctatgggacacagagatacagaccctgaagcatgattactcctattaggagccaatgataaaattgaagaactttccactgctttcagccaacaggatagaggacttttattactttccttgaggcagagggtggaatttgcaggtgttaatgaaatctaccagagtcttcccaagaattaataccattctttgaaatggcaggctctgaagacctttccttgaataggaaaggaataggaagagattccaagaatctctttccttgaatagggaagccaacactgcattgaagaaggcagtaagtgaaataaacaagtggagtttgtgtcatttcttgtccctgctctgtcatggaaagatgccttggtctaattctcttaggaaaaaaaatgtcctcatatcagtataaggtaaaatggaatattgttacatgtcatatgctaagagacacattattgtattcaacaaacatatagtatgttatactgtatgtcaggtgctgaacaaaataaactgtctactgtcgtgaggcttccgagatgctacatcacctctcataaaagaacttccccatttccacaatcacacccttataattgtcttcctaattagctcactagttatttatattatttccctaattttaataatgaaactatcccacagaagcactatagatgcccaagaagtagagacaggaagctacccattagttcccccatagggatttctctcccttatgaaggatataccacatctttgtttaaggaataaggaaaagagacaaaggtatgtaacataaataaagagaaagcacacagaatttagtgatatatgtgaaaggtaacgggataaaccaagcaactggtgtatgttaaggaggtgaatatagctaatgtccttggagaaaatttacctagttagaaaagatgtgtcaatttagtagaatatttttacaacctaaaatctaattgaaccaaactcctctttattgttgttagttctctattctgggttgcactaaataaaaacaatgaggcagtgaaagtgattttataaaagttgaatggcaaagggtgatgctgaatgtcaatacaatcgctgtatgttgtctgtgagccttacaattaccctctaaattagtatcatatctattttcaggtgtgtaccaagagtgtgaaattaaaaaactttgccaagttcaagtacacactacctataaattccagaacctgaatttgacctcatgtttattttactccaaagtgaggccgacttaaagtttcccgaatgcggccactggttttatgcagcatgatttctttgagacattgttatatacagcaatggaggtagggcagggggagggcagtgagatttcagagatggctagcttggacatgcaatagagtgggaaagtgacccaatgagaatcaattggagggggagagattggagagaggaaagataatcaacagtgagaagttcagagaaattagtttaaatgtgggaagcaatttcatcatcaggagatagcaatctatggcctgagggtgaaaatagacttgctacctgatttttgtaaataaagttttattggaacacatccatgtttattcacttaatgtattgtctccagatgctttggggctacaatttgcagtgacagagctgagttgggggcatctggtctttagtggtctgcaaaattgaagatacctattatctagccctttacagaaaaaagcttaaggttaaggagtcttggatcaaataacaggaagaataagattttcactgaaattagtgtaagtgtagataagtttctatattttggggacatctcttgtgctaacttctaatttctttacatatagacttgtggaataaatgagtacatagctaagaatattataaatgatgagaaaaaaagcaaaattccaaaacgggctacatgggaatatttatgtttaggttctcctcatagctcacaattaatttgtatatgcaattacaaactctatggactacggtcattctagaggaatattatttaagtgcagtatatgtcaatttgaaataataagttttcacgagatatgtgtattttgttttgatttttttggtatgtaaaaaccacttgtctaaagcagtttacttctgaattattttgcattttaaaagtatccagtgaatcatttttttcctatttataaatgactgattaaaataaataagacttggtgtttttccatgagacgtatttgaaaattaataaaattgttaaacttaggattaaggaaaataacattaagaatttatttggtcttctgagacattttgtaactatcctattttaaattaaatttagtacttttacaaaatctcgtttcaattaccaactcatatgaattccaaccaaatactgacttttaaaattattgaaacatccaccaaacagtacagagttattatgttcatccttcttctctggacttcatgaatctctgtcagccaaggaatgtcggtttgtttactgggtatcccatttttcctcccacacctcataggtgtgacttggatttcctcatcctcatcttggaaataggtccccccttttagggtgtttgtaagaattatatgaaacagtaagaacaaagaaatcactaggctagacgtctttcatgtgccatctaataaatttctgagaaagtttttttattgatgcttatgaaaattttattataaacttgcttttaaaaagaaatcttttatattgggttattaaattgttctaggtacatttctctaaatcttctattattttctctctgaccttccattgatttaggagaatttgccataacagtgcttatttctttttcttccttcttgattttatgagaaaggttctattgtgtggattataatagccaagacagaaagtctcaggtgaagtacaggaaaaaataaaggaataaaatataaaataagttagaaagtaaatgtatacccaaagatataaatggtagaattagagaaattagaggaagaaaacacacacacacacacacacacacacacatataagttggtatactatatatgtatgtgaatatgtatatatgtataaacacatatgaaatatgaataggaatattgggaagacatatatttgaaactatgaatattttatgccatattactccattttcaaggtattgattggttaaaacatattttatataaaacctgaaattggaagcacaaatgaccttaaataagaaattaaaattaccccaaacaatttagtaaatatttattatctgtgtactgtgctgttaggcacggggtcagtgtccccgccttcctacaatgcaagggttagtgtaatatctaaaggtatgtgacttgaaaaacgatgaagcaaaatgactggaaccttcattgagagtatgttttagagagacagagtagagttttagagagacatctgattttatagtagaaagtttattttaaactcacatataagcttttacagatacatttttatagtaaaatctcagctgctagaaaattagagtatatcagtatatgagattgctgtaggtttcgtggcactaacaaaaacacaaggatggatgaactaaaaaatgagtttgtttctctttcagacttacttctcttaaatgttgtgtagatgggagtgatggaggccttgtaggaagtctctgctcattcagggatccatagtcctgttgcccagtttttcgatcatcccctgggacgctgtcttcgtagtcacggttgaggatagctcaccagcttcatgtgtgtatcacgaccttcaggagggaggacgaagaagagagcatatctatgcccatttacgtcttaatgacgaagttggatgcgttatatccaactggccaatacttggttacatgccacatctaactgcaagggaaagtgggaactgtagtgacatttctagatagccaaattgtcccctaaactttctaatactacataaagggtgaagaaagatacatattggaggatgagcaatctttgccagagccatttttttaatgtaggaattaagattaatgtttttcaaaaaaaggcaggggttgcaatcctagtgtctgataaaacagactttagaccaacaaagatcaaaagagacaaagaaggccattacataatggtaaagggatcaattcaacaagaagagctaactatcctaaatatatatgcacccaattcaggagcacccagattcataaagcaagtccttatagacctacaaagagacttagactcccacacgttaataatgggagactttaacaccccactgacaacattagacagatcagtgagacagaatgtcaacaaggatatccaagaattgaactcagctctgcaacaagcggacctcatagacatctacagaactctccacccctaatcaacagattatacattcttctcagcaccacatcacacttattccaaaattgaccacatagttggaagttaaagcacccctcagcaaatgtaaaagaacagaaattataacaaagtgtctctcagaccacagttcaatcaaactagaactctggattaagaaactcactcaaaaccactcaactacatggaaactgaacaacctgctgctgaatgactactgggtacataacgaaatgaaggcagaaataaagatgttctttgaaaccaatgagaacaaagacacaacataccagaatctgtgggacacatttaaagcagtgtgtagagggaaatttatagcactgaatgcccacaagagaaagcaggaaagatctaaaattgacaccctaacataacaattaaaagaactagagaagcaagagcaaacacattcaaaagctagcagaaggcaagaaataactaagatcagagcccaactgaaggaaatagagacacaaaaagccctttaaaaaatcaatgaatctaggagctggttatgatcaacaaaattgatagatcgctagcaagactaataagaaaagagagaagaatcaaatagatgcaataaaaaataataaaggggatatcaccaccgatcccacagaaattcaaactaccatcagagaaaactgtaaacacctctacgcaaataaactagaaaatctagaaggaatggataaattcgtggacacatacaccctcccaagactaaaccaggaagttgaatccctgaatagaccaataacaggctctgaaattgaggcaataattaatagcctaccaaccaaaaaaagtccaggaccagatggattcacagccgaattctaccagaggtacaaggaagagctggtaccattccttctgaaactattccaatgaatagaaaaagagggaatcctccctaactcattttatgaggcaagcatcatcctgataccaaagcctggcagagacaaaacaaaaaaaagagaattttagaccaatatccttgatgaacattgatgcaaaaatcctcaataaaatactggcaatccgaatccagcagcacatcaaaaagcttatccaccattatcaagtgggcttcatccctgggatgcagggctggttcaacacacacaaatcaataaatataatgcagcatataaacagaaccaaagatagaaaccacatgattatctccatagatgcagaaaaggcctttgacaaaattcaacaaccttcatgctaaaaactctcaataaattaggtattgatgggacgtatcttaaaataataagagctatgtatgacaaacccacagccactatcatattgaatgggcaaaaactggaagcattccctttgaaaactggcacaagacagggatgccctctctcaccactcctattcaacatagtgttggaagttccggccagggcaatcaggcagaagaaggaaataaagggtattcaattaggaaaagaggaagtcaaattgtccctgtttgcagatgacatgattgtatatctagaaaaccccattgtctcagcccaaaatctacttaagctgataagcaacttcagcaaagtctcaggatacaaatcaatgtgcaaaaatcacaagcattcttatacaccaataacagacagaggcaaatcatgagtgaactccattcacaattgcttcaaagagaataaaatacctaggaatccaacttgcaagggatgtgaaggacctcttcaaggagaactacaaaccactgctcaccaaaatacaagaggacacaaacaaatggaagaacattctatgctcatggataggaagaatcaatattgtgaaaatggccatactgcccaaggtaatttatagattcaatgccatccccatcaagctaccaatgactttctacacggaattggaaaaaactactttaaagttcatatggaaccaaaaaagagcccacattgccaggtcaatcctaagccaaaagaacaaagctggaggtatcacactacctgattttaaactatactacaaggctacagtaaccaaaacagcatggtactggtatcagaatagagatatagaccaatggaacagaacaaagccctcagaaataatgccacatatctactactatctgatctttgacaaacctgagaaaaacaagcaatggggaaaggattccctatttaataaatggtgctgggaaaactggctagccatatgtagaaagctgaaactggatcccttccttacacattatacaaaaatgaattcaagatggatcaaagacttaaatgttagacctaaaaccataaaaacctagaagaaaacctaggcaatacctttcaggacataggcatgggtaaggacttcatgtccaaaacaccaaaagcaatggcaacaagagtcaaaattgacaaatgggatctaattaaaccaaggagcttctgcaaagcaaaagaaactaccatcatagtgaacaggcaacctacagaatgggagaaaatttttacaatctaatcatctggcaaagggctaatatccagaatctacaaagaagtcaaacaaatttacaagaaaaaaacaaccctatcaaaaagtgggcaaaggatatgaacagacacttctcaaaaaaggcattgatgcagccaacagacacatgaaaaaaatgctcatcatcactggccatcagagaaatgcaaatcaaaaccacaatgagataccattgcacatagttagaatggtgaacaataaaaagtcaggaaacaacaggtgctggagaggatgtggagaaataagagcacttttacactgttgatgggattgtaaactagttcaaccattgtggaagagagtgtgcaattcctcaaggatctagaactagaaataccatttgacccagccatcccattttatcccattacagtaatatacccattactgggtatattcccaaaggattaaaaatcatgctgctataaagacagatgcacacgtatgtttattgcggcactattcacaatagcaaagacttggaaccaacccaaatgtccatcgatgatagactggattaagaaaatgtggcacatatacaccatgaaatactatgcagccataaaacaggatgagttcatgtcctttgtagggacatggatgaagctggagaccatcattctcagcaagctaacgcaaggacaaaaaaccaaataccacatgttctcactcatgggtgggaattgaacaatgagaacccttggacacaggaaggggaacatcacacactgggtcccgtagtggggtggggggaggggggagggatagtattaggagatatacctgatgttaaatgacgagttaatgggtgtagcacaccatcatggcacatgtatacatatgtaacaaacctgaacgttgtgcacatgtaccctagtatttaaagtataaaaaaaaagattaatgtttttggctctagaaccttttgtttaataggctatagaatgagatttttaaaaactaaaataccccatatgtgtacgtatgatacccatttttgtcttcttaactggagcatcggaggcacaatgtagcatttctgtgagtggttctgcaatagtgaagaatgttaaatttgctgacatttaacatcaaaggcaaatcatagggattaacagaaggcgcagagttcgaatggtggacttgacacatgccttcttttagaaagaatttgttagctttattttttgctcagcttcttctgacttctttttctgtttatgtttttaaaaaactgttaaaattatgttttaaatttttgtggctacgtagtaggtgtatgtatttatggggtacatgagatgttttgatacagacatgcagtgtgaaataaggacatcatggataatggaggatttaccgggtctgtactaccatctgggctgtgtcccattgctgtctttctggtattctggtatcttcctcagtgtgatatcagtgtctgtgacttgcgtgcattatttagacttgacatttgatttcctactcagcaacgtaatgaagacgaggtattttcctagtagcttccaaaccattgattgaatttgtggaaattaagaaaaaatacactttgacttatttttaagaagttacgtgagggccggacaccgtggctcacacctgtaatcccagcactttgggaggctgaggtgggcggatgacctgaggtcaggagtttgagaccagcctggccaacgtgttgaaaccctgtctctattaaaaatataaaaattagcccggtgtggtggcttgtgcctgtaatcccagctactcgggaggctgaggcaggagaatggcttgaacccagaagggagaggctgcagtgagccgagatcccaccattgcactccagcctgggcaggaagagcaatactcaatctcaaaaaaacagaaaaaaaaaaagttatattatatttttttaaaagtgctgttgcttagactcttaattcattttcttcatttaaagagattgatcatattgggataaagacgtgttttggaatccaaacaacctggttttaagtcccagaaccaccagttacctttgtgacctttggcaagtcatctaatttttctatttccatttcctcatcctactaatttctatcaccctgatctgttgtagtgaaaaatgatataatgcgtgttaagtgattagcaaattgactgacactaagtactcaataaataatggcagctgttgttattgctgttgtatatgcggtagtagttgtatttgttgttgattgttgccctaacagcaggccatgatttttcctaaatcctcattagggcttaactttgaactcaatttcaggccctatctatattaaaaattacctatttaatagtgtcattaggttgaatgtcatgtacagtgttgcatgatggattaatttctcataaatcacttcagtaatcatttttatgctttgaatagtaccttggtttacgtgttatatctgtgagaaaacacagcggaaatgtgtcaagaatatttccaggtactaatcctggttgttcagaaatgctcttctgttatttagtgaaagaaccgcttggttatccctctgtaatcctttatcttggaaataatcttttactgaggggtaaaaagattatagaatacaccaaaaaattcaccatccatgcattgacttagactccatgaaaaagaagtatgatacatttaaatgaactgagaatgataaaatttgcaaatgttcttgaagcatttatgcattcaagaccaataaaactgtttttgatccaggttaacagtcgtatcatactttaaggctgaatttagataaattgccaaaatccattttatcagtgatataaaactgctcagtgatagactgtgccctctcatagtgtcccagctattttttctaagagctttgtggtttgctgggctgctggtttcactacctacatgtagccacttgattacttatctcagtttgaattgcccaaatcatgcttccagaaacacacagagctcattcacctgtttccccataaaaatcatttatcatttcaatgaactttggcccccaaacacaggcattgcagagcatttcttgggatctagaatgtgcttagcattttatatgcactatctcatctaatctttccagcagccttacgtacgtatatttttatttttcttgttttatagatggggtaactgagatgcagagaggttaaatacccaagatcagacagatagtaaactggattttaaaatatatttatatattcagaagtatcaaggctattgctgtatacttcattagaaccatttctagtcagagaaattctacgagtagaaattatgactagaaattgtctccagaaatgagtgtctagagatttttctagacattgctggactaaaacagtcatttatcatccctgatttttttacctttctcctttctgctctttcaccttttttttttttttttttttttttaaaagagacggagtcttgctgttttgcccaggccggagtgcagtggcgctttctcggctcactgcaagctccgcctcccgggttcacgcctttctcctcctacctcagcctcccgagtaactgggactacaggcgccgccaccgcgcccggctaattttttgtatttttagtagagacggggtttaaccatgttagcgaagatggtctcgatctcctgacctcgtgatccgcctgcctcagcctcccaaagtgctgggattacaggtctgagccaccgcacccggcctcttccaccttttttaatgagcgatgtcttcaaggaacataggtgacaatatctaatacttcctaaatctaacaggcagtaattaagcctctgaagtctgtggataacgttgaataaatttgagtgtactcaattttgggggaaaaaaaaaaaacaaaaacagaatcgtttcatccattcactgtcatgcctctcatcgtaatcattatttgcccaatgtactgaagagaaacataaactactgtgataaagacaaaataggattgaagcataggaaaaataattagttccagttgatgatactggcatcttcattcatgaaacgattggggtctatctttcttataaatagatctataaagaacaaaaaccaactttcctagaaaatctcttcatttgatgccatgacatgtatgaagtgatctccaatcttaggtacaatgtaaaattctgtgatgataaaaacatattttggggtgctgaaacaaagcataagccactttttatatctttatttccaaattctcagattaaacatcgttttattttaaaatgtcttttattccaaggtctctatggaaaatatacaaatgtagaattcaggcaaatttcttttttcgtcggtttgcttagtctgaaattctagagccatttccaattttgttttacaaactgcagaaaaaagtttaatctcaccttagaacatatatacatatacatatcaaaataaacccatatgcacatctgaaacaaaaattgagacaataattgttagtattatataagtgacacagactactatttttctgtttaattttaaaatattcctagtcataacctactaacatgattttatgaaccatgaatggattctgacttacaatttgaaaaacaatagtctatctagacaaataattactcagatcttaaattcaaattttgattataattctgtatatatatagttgaattgatggatataaatataaaattttgcatagcttattcagatttgaatttatctttaagaaggctgtctttgaaatgtttttgttttatgcacatcctcagacaaaatatttaggttcagaatttgagtactagatgtcatgtccttgagtataagtatacaccttttaatattttcttccaaaattcaatcctgtgtaaatatcaataaatcataaagtgtttaatattttgattcaaattgcacagtgtaaagtattgtgttacttgagtattagtgctgtttacaatgcttcgtttggagaagattatttgaactcaagatagttaatgatttttaagaactcttaaatacgagctaggttaaggttcagatttcaaaaagagttaaataatgtttgctcttacacatttttgggggcgtattttcgacaataattttccatctcctgaaacctgaacagtgacttaagaaggtaatcttggggcaatttatgcttcaaaacacttcttatatatgcagaggaatttgataataattacagccgtaacatactttatttagttgttatacaaggtcactctgtgaagtgcattatgcactctttaattcttaccacaatcttattatggaagtattattgttcccattttacagaagcagaaactaaggcttatgcagggctaggtaactcccaaagtcacaagattccctttctttctatatcatcaatttcagcataagtggttggttcatataggaacataacaggagtaggaaaggatatgatagggtttcttggtcgtttgtattttcttgaaaaaattgccttcttgctgcatttgaagcagggtctggttcagataggaagcattatctcccagggctgccagcaaccttgtttactcagttatagacataacacacttacgccatattctttgaatcttactaaacttactgtgagctcaccagacttctgtgcttctagggcattgaaaatgctatatgcaaataggacagatacacatattataccacctgtctcctctgcgcatgtgcatccttcattgcacataggacttcacttctaaaacacaaattcaaaaataaaattatttacaatttcaggatagtatcagcagataatagaggcatgtgtttcttctgcgctcagggccctgtgcaactgctcaggttgcacaaacgtgaagctggttccacctgcgcacatctctcaggctgcctttatatcattttcccccttaatgctgactttgatagttattattaatagtatttagagacggaagagatacaccatggaagttgttctaacccctaagaccttcagaaattgccttactgttagacaagggttccatgcaaatagccctttcagtgcacttaccctctttgatatgatgaagttcggtgattttgacttaccaggatgacctttctctgccacttttatagaaactggaaaaagagtgcatcatttgatgaaaatgtcattgcaataactgccactatgccttgtcatctcgaaggacttaacagttggggaaatttaaaatattgaattttcaaaatttgagcatttatcagaagagcacaagtaagttggtgctggcagcttagtgggttaattcccagaactgagaaggacaggaaatgtagcacatacacaccaggggaaagccaccaaaggttgaattttctctgggtgagattatgaaatcccccaaacagcttctgttgttctacactgctttttgattcctttacaaaaccctgtttgttagggggccccgtgcttgcttgcaatatttgtggaatgcagaagattcttctacaaatatttctccaatatttgtttgttctgctcacctccgtaaatagtatgcctatgtccttgacctcagcaaagtccctcttgagcatgttctcaggatttttgaagcccggcgacctgcaaggagtacactcctcccaaagcaaaacctcctgcaaacttagtagtttactcaaatttttgcccttgataaatgcctttaggttaaagcagcagacatgtagtttatcccaagaagcctctcctgtcacttgagtgtatggttcctatagcatgcaaatctctgcaaacatatggccaggtttacagctcatgtaaactaccccgtctctattacttggcttcagatggggagaagttagagccacgcagagcgctccagcctctccagaggaagcctttctcaccagatttttctaatcgacctccttgcttgctcttacacacctttaagctagatattggattaagggttgtgagaccaattttgtgatcacttcttagcaattttttaacaggtaccctggatcttctctttagaattatggatgcttcgtacactttgctcttggctttagggtccagacggaaattccaagacaaccatttgcattctcacttaatatcctgctaattaaattgggtaaagcatacttcatattttagttcttctaagataatgtcttactatttaaatcgtggccttctggaaataaaggctaaatcacagaagtcattatgctgttagaaattttagatgggtgggtgaggtattttttttctttctaaattttgccttcctttcccctacctccttgttttcttactgatgcctttactggtctgtaaatatttggaaatatttcattacctagggcctctcaggaagagatatttcctttaatgccattgcagaggtatgtaaatataattctgataatgtatatgtaagttattataaataagaaatgaggaaagttcctacagatcaatatttatagcatttaaaaagcaacatgaggtgatatactaatttactccttccagtaatctagaagagctttaatacaatattaatttggtgtggattttgaccgctatttgaaaattgatgtatgcatgaggaagttaaaatgaaaactccctattgtctgtatctgctgttcctgtgtttgataatgccagtggacagtcctagcattttaaatatttcattcgattcatcatttaatgtactggaacaatctgcaaagacattaattgtgtaacacccaatttattttattgtgcagcatttggaagctcctgaagacaagtcatttggcagttcattgatggagagtgaagtaaacctggaccgttatcaaacagctttagaagaagtattatcgtggcttctttctgctgaggacacattgcaagcacaaggagagatttctaatgatgtggaagtggtgaaagaccagtttcatactcatgaggtaaactaaaacgttaatttacaaaacaaaacatatgacttgttataatggcaagtcatcctttttcctcaattactctcttacatccttgtattttggaaatttagttactatgatgtgcttgggattccaacagtcagattttgaagttttcttttggagagcaaccattgaaggcatttctacctgatcggccaacaggaatacgaaagcccaacttctttctcttgtgtcaaggcagtgctgaggcattacttacattcctgagttgatgtatggtattgggcttaacttctctcagtgggagacttttcctgagatgatacactcgtttggcttctttcccttccctgtcctttttcctccatcttcaactcccttgcggaacttcctgggagctcttccttaataaatcacttgcactgaagtccttatctcggggcctgcttctgaagaacttgacttaagataattttccttaattcatattaaaagtggttttgggattctgcaaatacaaattaaattccttttactgggaatataaatctaaatgggccacaagtttaaaactgcaaacaaataaaactcaaaaccacaccgatttacctagagttctaattacaattgttaacttccttctttgtcaggggtacatgatggatttgacagcccatcagggccgggttggtaatattctacaattgggaagtaagctgattggaacaggaaaattatcagaagatgaagaaactgaagtacaagagcagatgaatctcctaaattcaagatgggaatgcctcagggtagctagcatggaaaaacaaagcaagtaagtccttatttgtttttaattaagaagactaacaagttttggaagcttgtgattattttgatgtggtttgatggttaagttacgattctcagtttgttcccaaggcacacagctttctttcaagggagactggttggattttcatagaaataacattttggttttcacttttgtaactaaaagagcagatgttagatagatgcactgttatctacagaactatgttttaagatttgccaaaattctgtcatagttattattttctaggttttcctccaaacattaaaatgtcactataaaaggcacagaagcatgcacaggagattgtgtacataaaatcacctattagctatagttgacacgaaacttctcttctgaagaaaaagcccttgaaaatattaaagagttactcatctatatatggaaatcctcttgaaaaacattattcaaacgttttgggaaattcttattaaaatacagtatggctatgaattatcttaagaatatatattgacttaataaaaaagaggatttgagacatttctgaaaaatgacatatttcttataaaggtaacaagcagatctcatcattctggatatgtgttttgatttatattgttaggtgtgtatattcatgtaaagcctatcaagacaagatagatttatttttaaatgaaaagaaatgaagtgccaactgtggatttgaatacattaagtgaaaaaaattgtccaaatgccttaagtttatttaactattatttatgaagttcaaaagcgttaaaaaaaaaaaaggaccaaggaaactcattagatatgctagaaggattggtattccagtactaaattatagtgtgaaattatggaggggaaaaacacatttttaagctcaggccttttgaaagaataaataaggtacatgtaagatagaggtttcataactatatatgtattccaagccaggagatactaatctatgcatattgatattattcgcctgctgtgatcgtggtgatgattgtcactacccctagatgtgagaggtacaataatcatattataactgttgagtctgcccactccccagtgtttaccaggtccactaatttactccatctattatcgatattaagatataagctgccttctgtggtcatatgccaacattcttcaggttagaacttctatttgcagtgatctgtggaacttaaagcaacctcaaacaaaattagaaagttttgaaaatccaaccacctctttactgtccttgccataatagccaccagtgtcttctcctttgtgcactctaggtttccatcctctcctggaggctaaatgctctcatttttcttacactccccattttcaataaaactaacaatatggcattaattattcatactaatcagttaattaattgctgtgtgaaattgagttgcaagaaaatatgaattcctcctggaattaaaattgcaactttttctttgcttatctgaaacataaaaaaagtcttttatctgtgattctaacatttaaaaagatgttcattcaaaaattccccccttcaagggatgtctgccattaagtgaaggatgacagacacctagacttctgtgcgtgtaatttcctcatccccatcccactagagaatggaaatgctaaaatggcagtattaccacctagctgagattgacataaaaaattagtttgtccttagggaagattcaagagcttttgtacgtgttacagcttttagaataattattaagaaggcaaggagagccttctagctggtatagcttttgctaaaacatctcacagagtttttaaaatgagacacgtacatgtaaccacttctatcacatagacttttctggaaaattccttaaaaatgaatatacaaagcattatttgagcaacacaaattcagaaataatatgagagtttataaataacagtcttccttgccactttgactatgtatgtgttcgtgcataaaacctattaaattctaatgtgataagccattatgtaagctttgctgaacctgatttttgaaagattttgtgagaggaaacaaaaaacgtgattatgaaaagagggtattgtcattatttttaaaaaactaatctaggttttacttaatgcttcaaataaattataacctgttcagtttccattatcatggtcatgagaatggattatctccaatgattagcttcaacttggagcattacctattttttttctaaatatatgattacttcagagtagaagattactagtaaacaaaaatggattcatcgatacttcttttctctctctacctaagacagggtttggatagatccagtcggaagccattatttcctgcctaagccttggtttagcgattagagaaatgataattaacatttgtctagtcatattaagtatatccaaagctatgctataatttctaagttgatataacaaaagttaaaaacttcttgtaaatacagataagcttatcactaaaatctatgaacatttacacttagcaattattaatcctatctaccaacatacttactattaggttgctgcaaaagtaatcatgtttttttccattgtaagtaatgggaaaaactgtaattacttttgtaccaacctaatagcaacatcaaattatatttgatatatagtcattgtgagatatatatatatatatatatatatatatacgtataaaatacacatatatctctctatatgaacaaatattaatggaatacattatcaaaaacaattaatggcactggagactcaataatgatcatacaaggtctggccccagatctcatgaaacatattctgtagaggctggcagccaagaaaaaaaagaacacaagaaaaataccggataggaatatagtttttgaagagattaaaatgtaatgtgatagagaatggttgaggggaggctactttagactttgtgatccaggtaagactttgaaggttggtaccatttagtttgagatttgaatgacaagaaggtaccactatttgcagatcacaaggaagtgtggttcacggattaggaacagctaatgcaaaggcccaaaaatagggacagtttggcttgctggaggaaccaaaaggccagggggactgtagagttgcagggtggtaagttagatggctgaggtctgagatggggttgaaatataggtaggagactgattacatattgtagtgtcagtcagggctttgaataagggctttgaattctagactaagtgcaagacaaagccatcagattttatgtaggtgagagataggtcaagaaaacctatcaggaaggccactggaggaagagaggacagttattaggccagtgaagttggccagttaagacacagtagtgtcttagaccagctggtagttgtgataaaagtatactttactatcttagccatttagttattttaaaaaccacttctctgtttagttttagttcctatttttttttccttttgacagtaaaagtgctttttcctttggaaatagactgcttcaatttgtgcccacagttactattattcaagttgcatctaggaaataatatttatcccataaaccatcaacaattatgcaaaacaagaaatattaaaaatacaaagataatagcgtgccctgatttctgccttacataaaatcctctccagtttgcctaaggaataagggcttgctttctcaaacacttatttatgtgaactggggcaatatacttttcttttctgttctctactttatagttttgtaaaacagcaatagtgtcatgaggctgacatacctctgaaagatactagatgagatagggtataaaaagttagtttgtgaatgcaaaattattataaaatgtgaagaaagataactgtgataaataagatgatgagctgtcagttaactattttaccataccatgtcactttttatatgtaatttgatattttctatatgaagtattatataattttatatataattatatttcatatattttgtataataacttatatataattttttaacttttaaaaaaattttgcagggaatgaggtcttgttatgtttcccaggctagtctcaagctcctggcctcaagtgatcctctcccaccttggcctcccaaagtactagtattacagacctgagctaccaaacctgaccctcatagatgttttttactttttttctccagccttttctaattgcctcagtcatttttttttcccaaagagtatagctgtggttattttgtatggggataagggagcatgagcaggatgattagaaatacatttgcagttattttttcacaatggcaacatttaaaaatatgcttacaaaggaatgtcaggaaagataaccatacagatacttcctcctttctttctccttcataaccacactctcatttgattctttccttgctattgtattttccctccaattctgttgcttttatggacataaatttctgatgaggtaaaagctaatacaataaagaagtttattaacacatctccagtcacaaatgagtttggcacgtgccgatactggtcaattacaaaactttaccaatgtttatatgatttaaatgagaaaactaagtgccattcctttcataatgtagtgtttaaaacaagagaatattgatgtggttttgttagaaccccttaagaggagtaagccaatgattttttttttaatgctgtggaatacacttgggatggtaggaggtaaggaattcggaagaaaaacacacaacttccaactgtggaagtgcaagaagacaactggcacagggaaaacagaagattttcttctctatgaataaactaattaatttgattgaaaaatgcaacctgcagagagcaaaaaagatttactgacatttttataaggactcaaagttaagcacagcaagttccatcaacttttctgataattgtagttaggacatgcaggcagaaactaaaacttctgtgacggtaagggaaaaaaatgaaagcaagtcaggaggccaagtgaagttgtgttttttggtttatatcagcaggaggagagatatgaatagtatctgggtagatacacaagccataatatggaaaataattgtgaatcaccatcaatgctttgactggacagaaaaatacatctaacaaatatggctcatctctttttttttcccccaagtgtctatttgactctggaaataagatggcatatgtgagagtggatagagaaaaggaggtgctgaacaaatgagtgggttattttctcccaagtgcagtgaagtttgcgtatgtgaatatatgaatgaatagatgaacaactaaattaagttattcaggtaattccaatcttggaattgaattcgttgcagtaaatactttggaggtgcacaatctcaaactcctaattgtgattttatttcacaatttggtaagttcattgatttttctgttttacttcttccagtaatgttaagcaatagtaacttgcagatcaaggtggtgtaggaccagtagcatcagcgtcacctgagaacttgttaaaaatgcagactctcagctctcattctgatatatacagaatcagaattgtgcagtttagcaatatcccaggtgatccctgatcagtttaagtttgagaagcactgatctaactgaaattaagacagagtagaaatctcaacttctttgtaaacctctacttagatatcttctgttcctatttttctatcaagtgacgtgggccaaatattttaattactttctcaggagctctaaaaatggtgctgatatttcattcagtcctcatatgttgatatcataccccatgggtgattaagcagtagcaagattctggtgcaataatatataacagacaatatatgagtgttgatgagtattgataattaagctattggactaataagaagtaggaattatttatagatgataacgtgacattcggttaggttgcacatggattatggtcataataatttttctgtcaataattaaaaatgtgataatgcagctaaatgtggacatctcttgtactaataatacaatgcatgtgactcatagtttaaattacaggaaagctaaatttctggaattcacagaaatgagagagccgtatcttcaaaaacaatgctttctcacaaagataaataatgctgatatggtttggctcatcttgaattgtagttctcataatccccatgtgttgtgggagggacctggtggaaggtaattgaatcatgggagtgtaaccctcatgctgttctcatgatagtgagtgagttctcacaagatctgatggttttataaggggcctttccccttttgcttggcccttcttcctgctgccatgtgaagaaggacatgtttgcttccccttccatcatgattttttctgaggcctccccagccatgccgaactgtgagtcaattaaacttgttttctttataaattatccagtctctattatgtctttaattagcagcgtgagaacagactagtacagtacattggtaccgcagagagtggggtgctgctataaagatacccgaacacgtggaagtgactttggaactgggtaacagccaggggttggaacaattcaaattaaactaatagactatctcagagagcagatttaatagaagttgacattttaatcttagtacaaaaattcccaatcagaaatatcaaaactatgtcttgttcataattaagttatactacttatacattgaagaaatatttattgagtgtgtagtatgtgccaggcactgtgccagatgctatgtagtggcaaaatttttgaagttgagagtgagcttctatttccacataaatgaatagaatttcagagtgtcaacattacctattcttactagagataatttaaacagtcttccaaacgtgatatattcatatttgtccttggctcctgatgacatctgccaatttctttattttctttaaaagcatttaatcaggaagattgatttgagggttgccataatgtatttgccacaagaatctttttctttttctttttcttttttttttgagacagagtctccctgtctcccaggctggagtgcagtggcgctatctcggctcactgcaagctccgccccccgggttcacgccattctcctggttcagcctccccagtagttgggactacaggtgcccgccaccacgctcggctaactttttgtatttttagtagagacggggtttcaccatgttattcaggatggtctcgacctcctgacctcgtgatccacctgccttagcctcctcagcctcagtgctgggattacaggcatgagccaccacgcctggccaagaatcttttgcatccagccacgcagcttctttatgttattgttactaaactgaatttatgttttcaaaatgaaaataaatgtgtttgcatttgaactttaatgttgcctcggatagttgaaaaatattaataattaaactgttcagctatatggatggaggacaaaaatggatcaggatttgaaaacaatgacacattttcgattttctcatagaattcagtataaaaacaatactatttctcacattccattaagtaggaaaataaatgttagtgcatgtttaattttgtgaaaaactggaacattttccttcatttctagttgttggatggggaactttatattaggttctttctgaactatttactgtgaggttgtaatttaaagtttgacctccaagatcaggttgcagggtgcagtataataactatggcaattagtgggaatttttgaaaatgatacatgacatgctctccttggcttctttcctagcccaagatgtcagcatacttcgtgttgggaaagaaggtgctgtaaagaggagaatgaacacattagttttagggggataaaaactgtataattttgtcagaccttgcctcacttcattctccaatggaaactactatattagtgcctaagatttatacacaccgtgacaccatgcagtgtcaggctttgcagctgagtctagtaaggaataccagaatttggaggaaagcagatctagttactgaggcaagtaggtaaactaggccagtagggtttctacagcttcacagatgctgagggtacccattcagaaagttagcatgagaactagaggacaatagcgatggatgtacttgtggtaaaggtgatgagatagtgaaaacagtgacagctgaagtcttacacatttgagggggtaattggttctgtttggattctggctttaaagcttatatttcacaggccacttattgaactttgataaacgttataaatcttgggagttgaaaaatactaatatgcttcctatggaccattcattattgccatgcaacaacaacaaaaaactatgtgcatatgtttgtacatgcactactcaagcttttcttttaaatgaatgttgcttttctatattaaaacatgtttgccatttcttggattataatatatcatgatttctgattcctatatttaatgatacaccatacattttaaaaatatctagtcattttatatggtcaccatatatttgagggaaaatgagtctcgaagtttattgtggaggaggtggagaaaaatcgccaaacagaagcctccagtaattatccctgttgcaggaacatcaaattgaacaactgtccacactagaaaagcaccttcataagagtgaaaaattaggtgcatgatcgtagtacctggtttttgggttgtatcacagaaagaggcacagaagagggtagtaaaggcaatattctatcacctataccagctctccctcatccatggcagcagtcacatggcatgaagagagagtctatgtgcttgcagaagggagattgcagtgattataggactttgcattgaaaatcagtgctgccctgtcacagtggaaaccgacaaagaacagaactcagccaaatcccgcagagggagcatttagatgaaccctagacagggaagaatcatccatcccagtgtttggaacctgagttccggcaagccttgtcatcatggattagagtgctctgtggttctaaataaacttcaaaggtagtctaggccacaaggactgcagttcctttgcaagtcctggtgctgtgccgggctcagagtcagtggacttgggatacatacaacctagtgagacatccgctggggcagctaagggactgcttgtgcttcccttcccccaaccccaggcagcacagctcacagctccaggaaagactccttccttccgcttatgaagaagagaggagacaagaaagagaactttgtcttgctgcttggataccagctcagacatacaataggatagggcaccaggcagagtcttgaggtccccattccaggccctagctcacagataacatttctgaacacaccctgggccagaagagagcctgtcaccttgaagagaaggaccccgtcctggcagaattcatgacatgctgaccaaagggacctagggccctgaataatcagcagctgtagccaggcagtacttgctgtgggtattgggtgagactcagagctgtgatggtttcaggtgtgacccagtacattcccagctgtggtggctacagggagagaatccttctgcttcaggaaaggagaggtgagagtaaaggggactttggcttgcagcttgggttccagtttgaccacagtggggcagagcatcaagtgggctcctagggtccctgattccagagtttggctcctggattccattttcttactgccctgaagggagagactcaggactgacagcattcaccacaggctggccaaagtggccttggcccttgagtgaacattggacctcagacagtactctctttggttcagtagtcgtcgtggccatgaggagagacatctctgtttgtggaaaggggagagaagagagggaaggactttatcttttgggtggggtgccagcttagccacagtagaatagagcaccaggtagatttcttaggttcttgagttgatatagtttggacatgtgtgcctgctcaaatctcacgttgaattgtagtaatctgcagtgtttgaggtagggcctagtgggagctcattggatcatgggggcaaatttttcataattggttgctactgtccttgcaatagtgagtaaattcttgcaagatctggttgtttaaaagcgtggcaccctccctctcactcttgctcctgctgtggccatgtgatgtacctgttcctccttcaccttctgccataattgtaagtttcctgaggcctccccagcagctgagcagatgccagcatcatatttcctgtacagcctgtagaactgtgagccaattaagcgtcttttctttataaattactcagtctcaggtatttcttgatagcaatgcgagagtggcctagtacagaaaattgttaccaagaagtggggctttgctgtcaagatacttgaaaatgtagaagctgctttgaaattgggtaacagacagaagttggatgagtttggagggctcagaagaagacagatgagggaaaatttggaatgtcttagagactggttaaatgattgttaccaaagtgctgatactgatatgcacagtgaagtccaagctgtcgaggtctcagatggaaagaatgaacttattggcaactggagtaaatgacatgtttgttatcccttagcaaagaagttggctgtattatgtccatgctctagatatctgtgaaagtttgaacttgagagtgatgatctcgtgtgtctgacggaatgaatttctaagcagcaaaatgttcaagacgttgtgtggccacttctaacaacctactctctgatgcaggagcaaagaaataagatggaatatttattattttattttattgtactttaagttctgagatacatgtgcagaacgtgcaggttttttacatatttatacatgtatatttaaaaggaaagcagaccataaaggttttcaaaatttgcaacatggatatgtggtagaaaataaaagcccattttcaggagaactcaagaaggcttctgagcaaccacttgctagaaaaatttgtatacctacaaagaaggcaagtgctgatagccaagacaatggggaaaaaggcctggaaggcatttcagagatctaaaaggcagcccctcccattatagatccggaggcctaagaggacagaatggtttcctgggccaggcccagggtcccagctgccctgttcaacctcgtacactgtgcccccgccccaacccctcccccccgcacccagcgtcctggccactgtagctccagctgtggctcagagtggcccaagtacagcttgggccacagctccagcgggtacaagccataagcctgcaggtgcacagagtgcaagagttgaggcttgggaacatccatctagattttagaggttgtatggaaaagcctgggtttccaggcagaagcctgctccaggggcagaaccctcacagagaacttctcctggggcaatgcagagggaaaatgtgggctttgatcccccacacgtagtccccactggggcattgcctagtggacctgtaagaagagggccactgtcctccagactccagaatggtagatccactgacagcttgacccttgtatctggaaatgaaacacacactcagcaccagaccataagagcagctttggaagctgaaccctagaaagccacaaagttggagtctgcccaaggccttgggagcacaccactcccaccagtttaccctggatgtaggacatggagtcaaagcagataattttggagttttaagatttaatgactaccctgctgggtttcagacttgcatgagacctttcttttgaccaatttcacccttttggaataggagtgttgactcaatgcttataatcccattgtatcttggaagtaactaattggtttttgattttacgggctcataggtagaagaaacttaccttgtctcagatgagactccggacttttgagttaattctggaataagtaaagaccttgggggactgtttggaagacatgattgtatgtttaaatgtgagaaggacttgagatttgggaggggccaggatggaatagtatggtttggatgtatgttcttgcccagatctcacattgaattacaatcctcactgtcagaggtggggcctgggtgggagccgaatgaatcatggcgttgaatttctcatgaatggtttagcactatcctcttagtgctgttttcatgatagtgggtgaattcttgtcagatccagttggttaaaagtgtgtggtaccctcccactcacctcttccctggccgtgtgacatgactgctcctccttcgcaatttgccatgattgtaaatctcctgaggcctccgcagaagcagagcagatgccagcatcatgtctcagggacaacctgcagaaccatgagccatttaagcctcttttcttcataaattacccagtatcagatatttctttatagcattgtgagaatggcctaatacatgaccccaggccctggcttacatataggatcttgcaaacccaccagggaaaaattgctaccctgaagtgaaaaacacaagcttcattggatttgccacctgccgattgtagagtccttgggccctgagtgaatgtaggtgatagccagtcagtggtcagtgtgggccttgatcaagacccagtgttgtactggctttaggagtgacccaacacaatcctagtcgtggtagctacaggggtgcttgtgtcacctctcctttagctccaggcagctcatcacagagagagactctctttgttgaggggaaggaaagagaaaaagattatctaccaggtaatacaggggattttcctgaatcttcccaaagatcaccaaggcagtacgtttaacagtctgcaagagtcacagcattactgggcttgggtgcaccccagtgcatatatggctgcagtgaccaaaggaataaatcacaacacccaagaacctttaaatacctggaaagccctcctgagaagtatggatacaaacaagccgatactgcaaagactacaataaataccaaagtcttcaatgcccagacattgatgaacatccggaagcatcaagaccatccaagaaaacatgatctcaccaactgaactaaataaggcatcgctgaccaatcttggagagacagatatgtgacctttcagacagagaattccaaatggctgatttgaggatgctcaataaaatccaagatagtacagagaaggaattcagaatcctacacataaatttaacaaagggattgaaataaaaagaatcgaacaaaaattctggagttgaaagatttaactgacatactgaagaatgcgtcagagacgagtaacagaagaattgatcaagcaggagaaagaattagcttgaagacaagctatttgtaaatacagtcagaggagacaaaaaagtcctaaaaagtttattgaagagggtaataacacagaacttcccccacctagagagagagattaaaattcaagtacaagaagataatagaacaccaaggagatataatataaataagactacctcagggcatttaaaaatcaaacttccaaaggtcaaggataaagaaaagatcttaaaagcggtaatcatataaaaaaaaaaatcacatagaaatagctccagtatgtctggcagcacaattttcagtggaaaacttccaggccaggagagtggcatgatacatttaaagtgctgaaggaaaagacttttattctagaatagtatatctatgaaaatcctcttcatacttgaaggagaaatgaagactttctaagacaaagaaaagctgacagatttcattaacaccaaaccttttctacaagaaatggtaaagggcgttcttcaatcttaaagaaaaggatgttaatgagcaatgagtcatcatctgaagtaacaaaactcactggtgatagtaaggtttgttactattctgttacaaagagaatattataacactgtgattatgatgtctcaactacccatatcttgagtaaaaagactaaaagacgaacctatcaaaaataactgcaacaacttttcaagacatagacactataataagatataaatagaaacaacaaaaagagtggggggatgaagttaaagtgtagcattttttttttttttagttttctctttgcttatttgtttatgcaaccagtgttgtcatgaatttcaaataatggattataacttattctttacaaacctcatagttaccacaaatcaaataatgtactcaggtacataaaaattaataagaatgtataacatatgaccagagaaaattactttcattaatagtaagacaggaaggaaagagagaatgaagagaaggccacaaaacaaccagaaaggaaatagcaaaatgggaagtgtttaagtccttaacgtaccaatgataacatggaatgtaaattgactaaactatccaatctaaatacattgagtgacagaatggataaaagaatatacaagacacaataatctgttacttacaagaaacacacttgaccaataaagataaagatagactgaaaataaagggatggaacaagtattccatgccaatcgaaaccaaaaaagaacaggattagctattcttttatcagacaaaataggtttcaagacaaaaactataaaaagggacaacgccggtcattgtagaatgataaaggggtcaattcagcaagaggacataacaattgtaaataaatatgtacccaacattggaacacccagacgtataaatcaaatattattagagttagagagatagaccccaaaacagtaatagccggtgatttcaattccccattttcagcagtggccagatagatcatccagacataaaatcaacaaagaaacatcagacttattatgcagtgtagaccaatttgaactaatagatatttacagaacattttatccaacagctgcagagtacatattcttcttctcagcacatggataattttcaaggacaagccatatgttctgccacgaaacaagtcttagaaaattcaaaaatcaaaataacataaattagcttttctgatcacaactgaatatatcaagatatcagtaggaagaattttggaaactatagagacacatggaaattaaacaatatgctcttgaattatcagtgggtcaaagaagaagttaagaaggaaactatagaatttcttgaaacgaatgaaaaaggaaacgcaatgtaaccaaaacctatgggaagcagtgaaagcagtactatgaggaaagtttataggtataaatacctacatcaaaaaagcagaagaactttcaaataattgaatgatacaccttaaagagctagaaaagaaggagcaaaccaaacccaaaattagtatgagaaaataaatattacagtaaggaacagagctgaaatacattaaagtacaacaaaatgatacaaaagatcaacaaaacaaaaagaaggtttttttgaaagggttgacaaaaatgacaagtcttaagcttgactaagaaagaatgagatccagtcacttacaacaacatggatggaactggaggacgttatgttgattaaaataagcccggcacagaaaaacaaactttgcatgttctcacttacttgtgagagcttaaaaaaaaaaaaaaaaaaaaaaaaaaaaaaaaaaaaattaaaacaactgaactcatggagatagagactagaatgatggttaccagaggatgggaatgctagtgggtcgggggcagtggggatcattaatgggtacaaaaatatagttagattgaatgaatgtgatgtagtatttgatagcacgacaggatgattactgtcaaacataatttgttgtacgttttaaaataacaaaaagtataattggaatgtttgtcacataaagaaatgataagtgctcgaggtgatggataccctattaaccctaatgtcatattatgcctgtatgcctgtatgaatatgtctcttgtatcccataaatataaacacatactatatacccaaaaaaataaaaatttaaaaaatagggtattgtggtttctatcattaaagtaaacatcatgctaagaacaattgtctcaagagtaacaactgtaattttcgttttggtgaaaataataaaattattaatgacaatctctgtataaaattccaccaaatgaacttctgttttctatttttttaatatttataatcagtgccataaatgactttataatagatataaagttaatctctaaaaagttaattttagttcaggcaatattgcatgattgtgaagcaggccccggagccaaactacctgagttcccactttgtcaccttcccttgtttgcgttttgacccaagtaagcctttgtttccccacctgtaaattggggctaatatcagttgctgaatcaataggattaattacaataatacctctttttttctgacacacaattattattttgtatttaaaaattatatttaaaagccccaaattctacaagatcaaaattactctttagtaagtcttcttttttatttgtaatttctgggggtacataatagatattttagtacttgtggaagtcatttataaataagtaaacgcatgtttgtgcatcctgatcctttgtctccatgttacctctgtgcatctggttcatgttaaccctaacaagtcatgttgtctggatacagctttccaggtatttgccacttgtgaggacccaagggctaaagtaaaaattatggctgtgtcctggggcgggggggggggcggggaagaggcacaatcgttctcaaccctggatgttcattcgaattacctggttggatagttttttacagaaccaatacctgggctccattcccagatattctgattgaattgttggggaatggggctgggacgtcattttgaaaagttctctcagtgattctaatcaattagtacctttttatattaaggcattatttatataaattccactaattcacctatctgtgatagtttgaataaaagccggacttaaacattacctcaattaataactttctgttttttaacctatcttggatttcttttcttttttctctccctcttttattattattattatactttaatttctaggatgcatgtgcacaactcgcaggtttgatacataggtatacatgtgccatgttggtttgctgcacccatcagctcatttacattaggtatttctcctaatgctattccttccccagcccccaatacctttcttaatagagaatgaaacaaaagctgaaacaaagttgattttaaaaattacttatttaagcagatgacagcattctagaagcatctagttgcatataaagaattgttaagctaaaaccaaaactaatctatctataagaaccaccttgctagaatttttgagccatcgttttgttatttttatctatttttttaagacggagttttgttctttcacccaggctggagtgaagtggtgtgatctcagctcactgcaacctctgtccccccgggttcaagtgattctcctgcctcagcctcctgagtagccgggattaaaaagtgcttgccaccacgcccagctaatttttgtatttttagtagagatggggtttctattggccaggctggtcttgaactcctgacctcaggtgatccagccacctcggcctcccaaaatgctgggattacaggcctgagccactgtgcccagcctgagccatcattttgaataagtaaataaatcaattccaattttcatcagtacaattttagtttctaaatggcgtgcatttaaaagtaaaaacatgcattaaaaattaagtttctctaatttgtactggtatctttcccttaaatcatattatacaggttttatttctgacttaaatcatgtaattgtattttacatgtaagacatgtcaattgaacatcactggtagttcttttctaatctagactttcattataatacattacctccttttattaggtgtatttttttaaattgaggattgcatatatgccagtaactgtgaattctagggaattgggcctgagagcctgtcttcctaaagagctcacacctcttggtaatttgtaagttttaattgtagtcctctaggttttataaagtctatccatttatgcctttattagttagtgcctagcatatgattatgttttcataatatatgtttatacattttataatgtatttccataaagcacaaaaaatgctattaggaccatcaaatacaggctgaaattaatgaaaacatgtactattttgcatttataaatttgtatatggaaaatgaaaattttaaaaaatgctattaatgtttattgctagattgctaaacttaggatgtcattcctcatagacattggaggacaaaataaattggtatggataagtacttgcaaataaggattcacggatattggtaatctaattatctgtcggtttatagctgtgctgtccaatattgcagccgctagctatgtgtaggtaaattataattattataattaaatatagttaaaaattcagtttctgagccttactagccatacatatttcaagtgttcattattcccacctgactagtgtccattatatatgtatacctatagtgcacacatagaatatttacatcattttagtaagttctggacaacactggttaaagaataattgccttcctacattctttcttttttgttttttgaaacggcgtttcactctgtcactcaggctggagtctaatggtgcgaactcagctcactgcaacctccgcctcccgggttcaagcaattgtcctgcctcagcctcctgagtagctgggactacaggcatgtgccaccactcccggctaatttttgtatttttagtggagatggggtttcaccatgttggccaggatgctttcgaactcctgaccttgtgatccgccgcctcagcctcccaaagtgatgagattacaggcgtgagccatcgcacccagccgccttcctacattctaacagagtttctgtaaagcaaagctggcattcccattgaattcctttatgttcatacagatacgttttcatgtccgggggtgggatgacagctctcgagtaaaatcatttgaaaaatactacgtcttagaatgccatttactgcaaatgacaaaaaggccaactcaaagtgacttataccattgctccttaaaatgtgattaatggatccgaagcattgatatcccttgggcagttgttagaaatgcagaatctcaggccccaacccaggcctactgacttagaatgcatagtttgacactctccaggtgattcatatgtacattaaagtttgagaaacactgggcacaatcataaggatgtctgttatctaacaatatatcaaaaatgtcgttgacgctagagaccattaggtctgtaactctatgttgccaaagttccaagttcttacaacttatctgttttgctagcccctctctattctcagatgatctgaacgattggaagtttaccgtagcagttcctagtatcatgtcctgatatgcttttgcctatacctactgtcaggaccaactcctgccctatactactttattctaattccactccctcggctctctattgccagtcatatatgtatactccattcaccttttgcttttactttcccgtctaaatgacgacttgaaggatataaaatgaaacctggaaaaatgcaaacattttttcctatctgtgcatggtagatttttattttgtgactttgacaatttttccaaatttatttacatctttagaatgttagctggaaataagaaactcctgtctcattttcatcatgttttaaattgaactatatgaagccattttcatcaacaaagaaattgaaatatcagaaatttcatatgatctaatacaatattttgcccatgaaaaaaataaaatagtgcacagtcttgggtcacacagggtttgtgatttctatactggcttcacatgccactgtgccagctctttaacctaccactatcctcagaaataaaataacagtagctaggtgcggtggctcacgcctgtaatcccagaactttgggaggtcgaggcaggaggatagctggagaccaggagttcaagactagcctgggcaacatagggagaccacatctatacaaaaagagttaaaaatttgccagggaaggtggtgcacctgtagtctcagctactcaggaggctgaggcaggaggatcatttgggcctgggaggtcaaggcttcagtgagttatgattgtgtcactgtactcgagcctgggtaacagaatgagaccctgtctcaaaaaaaaaaaaaaaaatactagtattataaatctttaccttggcaaggttatgttaaaaaaagttgaataaatgttagccagtgtattttacaactaatattaatgacattttaacccagaggttaacctccccactccctgaagtcacccctttatttaaaccatctttgggaaaaaggacatttgtgtcatgaaggctgttaaactcaccttctgatatcagtgcctccttcaattttgcttcttcctctggttcagccttgcaatggaccactactcacttccttgctaatcacccagaaaactctggcctataattcacctgcactttactgatgctcttttcacaggcctcagtgaaggaaggaagcgtcctcttcattactagttatttcaatctttagagtttttcacatatcagtactgtaataaagcccttccttactttactgaagggcatacttgggcattctgagtctgataccctttgatacttccctgccagtgtcacataaatctatatcttctgagttttagcagtagtaactaatagatcgaacacataccttaagtagactagcagtggttttcaaataaataatattcttacctggaatgttgtcattcaaagtgtgatccatgacccagcaacattggtttcacctggaagctggttagaactgaattcttcgacccaaccccgtgaatttaaatcagaatcaccaggtgggctgtatccatatttaagtttgagaagctgtgatcaagaccccggggggcaccaaatccaaatgcctattgtagaagccagaaacataacataaggaagtgagatgagttgcgtataaaaaaggatagggagtgatgaggactacagcaaactggagagcttatactttgtatatgaagtataattggatgcgaagtataattggatgtgaagtataattgatactcaattttgtcctataggaaggaaggtttagggttgctgaatcctattaaatatgatcaagagtggtcagatttgatatttgtagctaatatctcaaattttaactactggcaaaaatttcaatttattttcaattagtatgagaccaaatccagcatatggactactatttgctaatatctagtcaaggcctgtagtaaggaaaagaaatattttctcaattaaaacatctcagaatcctttccaacaatgggatgaatgctttttgttttcgtgcttattagtatcacacctccacaatccttaggttcttctgttttcaaacttgttctgaggttaatttcatgcttcagacacatgaaatcctgctttttggagcctcaggtagaacccattctttggcagttggcagtcacacttctctctgtaagtggaggtgaagtcaggaagagaatgtaaaagtctcatgtcaaaataattcatagtaatctcctggggattggcagttgtcctcctattaatgttaatatcttggtctctgcagaatttgggtgagttgtgtttgtagaataaagttacctagagcagtaattttcaagtgtgagtatgcatcagtcacctggaagtcctgttaaaatacacatttctagacctcatcccagagtttctgattcagtaagtgtgagtcttgcacacacttctagcaagttttgaatttgcacttctagcaagtttctaggggatgggctgatgctgttggtccagggtccagtaaccacactttcagaaccactaatgaagagagaaaaagcagggctctatttggctgggagacattgatgtgactgtaccagtcattaaaatattgagccatcccgtttgcacacacccagccattctggtccctaccccaaaaatccccaaccagatgtttctgtatcccacttataaagagaaaacacctggctgggttcggggactcgcgcctataatcccagcacttttgggaggccaaggggagaggattgcttgagctaaggagttgaagaccagcctgggcaacataatgagaccttgtctctattaagagaaaaaaaaaaaaagaagataaaacacttatgtgtacatctcttcttattggtcaatctctgagtccaagtttgtaaaatgaaaccacgatagaacatgaaagattactgggtgttcaaatttcagatttggggcagagctcaagaaatctctgtggacccacagattaaggtaggctatgatactgtacaaccatcctgcaccttgtgcgatcaagctgcactggatttccggttcctctgtgatgtgacagggcctttcacaggtctttctttccgtctagaaagagtttataccttctttttcactacttctgacttcagtcttcacagttgtccagtactgcactaaaggcccccctttacagactcaattcaattgctctcatttcatagtatgatcacattataaccaactaatggcctgttgagctatatgtattatctgtggccctcacccgccatccatataaactccaagatagcaaggggctgtgttggtcttccttgcctctccatccgtagtatccaggtactcaataattgtatatttcgtaaattaatgaatgaatttttcaagtctcaactcttaggctgtgtgttctgcgaggacactgttcccaatgactgcaggtcaatttgtatcctctccttactccctcaggaatgtatataaatctaattataatggatttcttatattctaattatttttgtatttatgtctctaatagtctctaagctacttgaaattgaagataggtattttgtccattcctaacaaatatgagtttcctgcatagatatgaaactcagtaaagatttgttgaaggaaatgtctgtccaaaagcaaaaagtaaatgatgctttcaaatactagcaactttcagtttttgcttccacttaaatggatatctcatctctgttgtttctcataaaaataaaatgtctactttttgtgtttgataaatgaaagtttattctcataacttctgattgcaatgttcctcatggtaaatgtgtctctaaaatgttaaaagtcaataaatagtgcaatctaaattattgtaaacactctcaaaaggaatatgaaatgcatattggaagaaagctctgataacaaccccaatacttcggaccagctatggagccattatcttttatattttattttactggtttacttcccctgtttccctgtaattttatatgaagagtgtgagtggtatgtaacattacatacaggttccatgttggggtttaaatagcctggcattagtgtatgaggataaagatgctgatggaattttgtatccttttgttttaaatacacttatactaatttaagtattttgatagttactctgtttagcagattcatttcacttttctccttcttgctctgttcaaagaggatgaagtctagattttctgttacccaggttcctcttggcctttggttgctaaagtacttcagccaatgggaggcactggcaagagggtgaaagcagagattgtggtacttttctcttcctcttctgtttcttactgtggagtggctggaattgtgttcctcttaaactacagctactgttggacagctcttgttccatgtctctaattctcactgagctccggcaacagctctcttccttttttcttccagttccggggatgctaggtcagttgtctttgttgttaggtcctggctccttcactatcgtttattatttttcccccgacccttcacataaatgtgtaagtagtctactgagcgaaacatatttgagtgtgttctatctttcctgccaatagtatgcagcatccacacacacactcaacagacccaacttttatattttattgtttgaaatgctatcaatttctaaacattgctttttaaaccctactttaaattgacagataaaattgtatattcatcatgtacaacgtgatgcttctgagtaaatatatattgtggaacagttgaatctagctaattaacatatgcattaccttacatatttatcatttttatggtgggaatatttaacgtcctctctctctacatttttcaagagtatattttcattagctgtagtcaccatgctgtaaaatacatcacttgaatattttgactgtgactatatatcccttgaaaagtatctccatacctcccccttccccataaccacctcagcctctggtaaccactattcattccctacttctgtgggatcagctcttttagattccacatataagtgaaattaggcagtggttttctttctttactggcttatttcacttaacataatatcctccaggttcatccatgttgttgcaaatgacagtattttattcttttttatggctgaatagtattccattgtatatatgtataccacattttctttatccgttcatatgttggtggatatttggattgattccatatcttggccatgaatagtgctgcaataaaaatggtagtgcagatatttctttgacatactgatttcatttcctttgtatatataattcatagtgggattttgtatcatattgtagttttgttgttcatatttcaaggagccttcatactgttttccatgatgcctgtactgattgccattcccatttacagtgtgtaaaggttttcttttttttaattagtaatttttaacttttgcaggtacgtaatacatgcctttttcctaaatcgttatcaacatttatctttttttgttttggatagtagccatgctaacaaaagtgaggtgataatctcttcttttttcttttgacaaagatatcgttaattactattatattttaacttttaggtgcaagggtacatgtgcagttttgttacatgggtaaacttgtgtcatggaagtttattgtacagattatttcatcaccaggtataagcttagtactcattagttattttttcctaattctttccttctgccaccctccaaactccaataggccccatgtctgttgtttccctctatgtgcccatgtgttctcatcatttagctcccacttataagtgagaacgtggtgtatttggttttctgtttctgcgttattttgctaaggataatggcctccagcttcatctacgtttctgcaaagaacataatcttactctttttcatggccgcatagtattccatggtatgtgtttaccacattttctttatccagtttaccactgataagcatttaggttgattgtctttgtgattgtgaatagtgctgccacgaacatatgtgtgcatgtgtctttttggtagaatgatttatattcctttaagtgtatacacaataataggattgctgggtccaatggtagttctgttttgaggtctttgtggaatcaccacactgttttcaacaatagttgaaataatttacactcccacaaacagtgtataagtgttcccttttctttgcaagtaagctgatacctcattgtggttttaatttgcatttcccagatgattagtgctgttgagcattttttcatatctgtgttatccatttgtcccttttatgataaatgtctattttggtcttttgcctatttttaatcaggttatttgttttcttgctatggagttggttgaatttcttccatatttttatatgaacccccatcagatatatagtttgcaaatatttttctcattctattggatatctctttactctgttaatttttaattttaattttaatttttttgctgtgcagaaatttttagtttggtataagtcctcagtctatttttgcttttgttgcttgtgcttttacagtcatattcaaaagttattgcccaaataattgtgatgaagcttgtcctctatgttttctactaatagattgagagttttgagtcttaaatttaagtttttaatccatttcaaattggtttttgtatgtggcaagggataagggtctaatttcattcttctgcatgtagattcttacttttcctggtagcatttgctgaagagggtgtcctgtcctcacggtgtgttcttgacacccatgtccaaaatcagttgaatgcaaatgcattaatttattcctgggttctctattatgttccactgatcagtttttatgctaatacaatgctgtcttggttactatggcagaatttcttctagttgcgtactttgaccttagtgggaaataaaaaacatccttccaaagaaccatattattagtgtttccatattgatcgagtatcttctgttttttttattggttaacactatcatatatgggtatactaagagactcctggcaaatgcccatagttttctaatgtagtactacttgccccgcattgtattgggtgaactcagttgaccatttgtgcttaggttctgtatggtaacccctttctctgtctgtggattcagcagcatgaggagccaaacatgaacagcggtcatctcaacttctagtttaaagaaatcatttttgagtttcttataactcaaaatgttgaagaggtagttcaaaaaaaagttgaagaggtagttcacagataaggaacagaagtcacaaggtggagagagatggataaattaatattaggttaatacagatgagataattatatatagaagtatttatgggtgagtacacactcacacatccacttctttatgtcaacccagaggtcctgtaagctacaacaccctagaagcaaggagcatacctagcaacaggatcttgggtttcagtaacattctttaaagaaaaaaaaaaaaaaaaaaaaaaaaaggaaccagaacactgtggagaaacagctgattctaacactaggaaagggaatatagaaaatgagcctggaacatttggtagtgccagatagtaagaacatgctaaactccacggtctcgctctaaacaaaaaacactgatgggatgtgtcaaagaagccaactaagagacttcccaatgtccaaagctggaactatttgagcaaaaatccaaagcaaaaactagtattggatttagcccaaagtatcaaataactatacatgagtccatgctatgtaaataaataatttcataaataaatggaggaatagagacaaatctccaatgcagaaaaaactccaaaaacttatgtaacttctctgccctcacggagagggaatgtaactccccactccacaggggctgtgtatagtgactttcttattaaaaaacagtgtgaaaagagggggaaagagtaactttatagtggataaacatgacacctattactttagccaggtggtcacatttaacattgataagtcacgttgagggtatatatgctttataaaatgtgcttaaaatggcccattacttctgtggtctttcaaaaaccccagtttaattatgaggaaaaaaaatcagacaaatccccactgagaggcatactacaaaataccagcctggccagcacttttaaaaactgccagaaaaattctgagaaactgtcatagccaaaagcagattaaggaaacaggacaattgagtgtaatatggaatccttggagagatactgaaatacaaaaaatagtttaaggaaatcagaatataataatagtctccagctaatgcacaaatattggttcattaattgtaagagatgttccataataacataagatgttaataaaacgggagactgagtgcaagttatatgataactctttgtattataatctcattaatttttcgtgaatctaaaacagccaaaaaattaaatctgttaaaaaacactctcagctatgtgtgcactttgtgtgtttaaatgtgatgattaatggaaacttccagtaaagattttagagtaaaattatgtattcaaaataacatattcctaattcaaattataagatcaatgttcagaatatagttttgaaaaatgctttaaacatgatgtttataaagagtatttcctttaaaataaccatcagcacttctcatttgcatctcaaattttggttgaattaatgaatgaacaataatgtgttttcatcctcaacataaagttgtgtaattaataggcaaaacattatcccatgtccctgatgctggaaatgtaattgagaacgtttaagaacctggttgtagagcttaccgctgggctgtgaacctaggcctttggactttaaattcattacccagcccactattttctatatctttgtggggaaaaagcaccctttctctagtctatttgtgtgtatcaaatgacgtccaaacttaatgggttaaaacaatttataattgcgtcatgatctgaagaccgagaatataagcagggctcagccaggttgtttttatattactagttttatagctgggggtcaccccttgggctgtgctgagctggaagctcacttctaatacagtattttatcctgcagaatcactcctatatggtctctaatgattcggtagtgtagcctggcctcctttacagcatggaatctaggcttcaagagaggaagaaatacaaatgctgccagttcttttatagcctacacttggaattggtgtggtgtcagttatgccacattctgtggtcaaaaaaaaaaacacaagtccagatcatattcacagggatggaaaatagacctcatctcttgaagggaaaagtgacaaagaatttgtggccatctttaaccaccacacatactaaataatgagaatgtaaacgaacaactgccaaaatatactacttagtcaattatcagatgctttgcacttcagttagcatgttcacatttagttgactatgtgaaagtttttagaaatcaggatttgtgaactattataagtctgagaaataatagttccggggtgactgatagtgggctttacttacatccttctcaatgtccaatagatgcccccaaatgcgaacattccatatattataaattctattgttttacattgtgatgttcagtaataagttgctttcaaagaggtcataataggcttctttcaaattttcagtttacatagagttttaatggatctccagaatcagaaactgaaagagttgaatgactggctaacaaaaacagaagaaagaacaaggaaaatggaggaagagcctcttggacctgatcttgaagacctaaaacgccaagtacaacaacataaggtaggtgtatcttatgttgcgtgctttctactagaaagcaaactctgtgtatagtacctatacacagtaacacagatgacatggttgatgggagagaattaaaacttaaagtcagccatattttaaaaattatttttacctaattgtttttgcaatctttgttgcaatggcttgaataagtcccctccaaaattcaggtgattgtattaggagatggaatatttaagggtgaataatccatcagggctcctcccttaagaataggatcaagtcccatataaaagaggcttcacacagtgttctcctatctcttgaccctccaccatgcaccaccatgtgaaaactctgtgaaaaggccctcaccagatgctaacatcttgatcttggatttcccaaactcgagaactgtgaaaaaataaaggtacattcttcctaaattacctcattctcagttatttttgttacagcagcacaaaatggattaagacatttgttgttgtttttttaaaaaatacagcatagctaggcttttcgtatttggaaaagaaatcaaacatatttgtggatgagaacaacgcagggtatgtgatttattaaaaatttgctttcctggaagacagacttcatagggattacttgtaatgcaaatttaaataataaggctacgattttttttaatgtaattttacattcaatttatagtaaattgaagctggccaagcttgatgataaatgagagtctgaagcattgcttttctatagaatatgacattttttaaatgttaatatttccatcttttttcttcagtttacttgtacatttccagttatgctccctcgctgccagaaagcatttttttttgtttctgttattgagacttctacaataatatttcttatccaaaattatgagggtgctttattttaataagtgccataaaatattacaattagctctgagttttattgttgaaataggctcctgctcaattcatgaggaaacacacacacacacaagatcctttgtaattgtcccaggattagggttgccacatttagcagacacaaataaaagaagcctacttaaatgtaaatttcagataaacaacaaataattttcttagtgtgtgtcccaaattgttcattgtttatctgaaattcacattttgctgagtgtcttttattttatctggcaactctacttatgatctgtggtttttggatttatggctttgaataggaatatctgctcctttacctcataccttcgaaatctgccttttgtcaaacttaattctctctttttataatattcagtcatatatagctttacagttcttccatgcaaatgaaagatacatttatttctaagttctagagttttttttaagtttaatgagcttcagttttgaatgacaaatggggccagcccttactattattgacccccaggagtcctctaagatctagcatttaagaagaactgtaactatggtaatccccgtctgctatgccatcaggaaaaaaacatcaactgtattgcaattatgtagaaattgtaactgtgattacttgtcatatagatactaattgagcacctgaagaagaagttaggtacagtgctagttctctaaccgtaccgcttttccgatgtggcacatttgcttctctcgttgacactatatctgccctctttcccttggcctacactggaagttacatgcagaaagtgtctatataaaccaggggtgtccaacccgttggcttccctgggcgacattggaagaattgtcttgggccacacataaaatatactaacactaatgatagctggtgaactaaaagaaataattgaaaaaatattttaagaaagtttacaaatttgtgttgggccacattgaaagccatcctgggtcatggattggacaaggttgatgtacagcaatggcttctctctaccggagggtatttctggtgcagaaccatttcagccagtttgaaggtggacaggaagtggaattagtgccaccagagctgcccttagccaatgaggagtaaaagttgatagagaaatcctgtagaatctttgtcccatagtgggacatttctaaggtatattctccacagtctttcagagattccccagtaagactgagctccaggtatccacagggtaacttcctgaacgtccccgtgctctcataatgccttacgagttcaccctccaaataaaccatttatttgttcacaaatcttttgttcaggatgtgtttttggaggaatctaacccaagacaaacttctcccactagaagccagaattcgagctccagttctaccactaactaaattgtcattttccaaacatcacttaatgtcccaggttctctgtatctttactttggaaataaaagagtgagtttgtttctagtgttccttccagtcacagtttaaatgtgtccaatacttttggaagttgaagtattttagaaaaggccaagattaggccacgtaacactgaacatcagaaggcaggacactgctgctggatgcctggagtgtaaagcgaaatccagggagaagagctccaaaagagcagtagaagaagaatgttagcatagctaagtacggataacctagggcagctatgaaggaagttcttagcttgggacgctgaacagactcttcattaaggtgagacaagctatccaggatcttaatattctgccaggtacctgaaatgttttgtagttttttctgaaagatataatgtgaatgaaatggaaaacgtttgacaaatattgtcataaaatttaaatatattattcattacttgaaagtatgccatttctaatgactatgaaattgccttgaagaaaaaatgtgaaacaaaagaaggcaacaggagtatatgcaagttgattatgtaacattttacctccaggcattatttatttatttaaagggcataaagaggccagaaggcattggttttctggctcagagagtaaggccaactcctacttttaactatttgagcactcttttttttgacagatttgacaatattttttgaaatatttgacagattttttttttataaaaattaagggaaagattcatattcaagtcctgaatattgataatgctcttttgtttcttggcaacaattttggcgagaagaaggtgacttaacatcaaacaatttagcaaagagttgactttatttaaacctgaaacatgtacattatattgtcttttaagactaaaaggagcatacatacagaattaaaggaacactgttttgttagtcttgccacacttcataaaacaaaagaaaataaatgttacttctttgggtaactgagttcaaactaaagccttatttatatagtcgttgaatcgctttgcagctttttttcccaagaattgtaaatcattgaaagtaaggaaatttctccttctgacaacaaaatgcatcagtaaccttagagtccccacaaaagcaactcccatctgctgcatcaccaaacttctaacctaatataatatttatttttagctttgtgtagatagacattaaatccttgtgccatcaccattttttcttaaagatgattgcagatgacaaaattaaagaaaagatacagattttattgctgggaattgatttaaattctgctcagatcagaggtcgcctgctctctctctctcaactggagggcaagattaaaatgtttgcaaatcttgcaagtacactgtgaatattacagatatgcttctgtatattctgtgacaggatcctttgctatcttcatttcaacagcattttattatgaggcaggctagaaattcagacactgtgaaatgtcaggaagataagtcacttttactgaacctggcaattaggtaaggtaaagcaattgatcctatatggtggttactattaaatctagccaaactctttactctgggtaaccaagaaaagttcaattggctgcaccatttgggagaaaccactcatccttcatagacattgctgtagggagagaatttagaggtttgctttagctttgaggcacccaagagtgagtctttctggggagtaaacaaatcgaacctctcattcccctgtgaaaaaatatatcacatataattctagctggtcttttttgtcttaaggggtagaatttattagtgatgttgacaaagaatgaaaggatttccctcgaaggagtggcatgatgctattgaggaggaaaagccttgagctttcattaatagtaaagaagtttgccattttggaggcatttttttcaaaaggaaaatatttaacagtgaaatcttttgtctcctggcacagtgagactgcgatgaagtttaaagctgagtttactagctaggttttccattcttttgagagatttagacttttgtgcatagatgcataaccttggtgacagcatcaacaaagactttacaaattacaagaatttgccgatgtgaatatatactctatattctgacttcagtgaaggttatatgtgaaatactgattaatacaaactaagtagcctcttagaaactcagtcacctatccttttcttgaaggttagttaaaggcagacatttgggttgccaagattgtgaaatatcctcatctggtgacctttaaaatgatctagatgttcatgttacagagaaggattaggtataattctgccaaaggatctgacatttcatttcattccattgcattctattccatatcactgaacaaaccctcattatagcacatgggtgctgtgaagaatgcagaaaccaatcatttacgatgtcttgtactatactgaatgctggaggatttaagcctgatcatggagggtgatcatgagtcttatataaaagactcaggcatttgcagtagtagttctatgagtaacaggaaaccattattcatgagaaattaaactagaaatagcagcaatttaggaaaacttatcttaatatttaagaagatattttttgaggataaataaaagagcagagaaacaggaggccggaaaacatgttaagaggatattgctgaaagtatatagagcctgaatgaaagcaatgacaacaaaaattgtaaacaggtacaaagcattctggatatcaaatcaaaaccaataggactagatttaggatatgaacaaaaagctcaaagtaatagattctgggactgggcaattgggacttgagattggtaattaagaaaataggcagtgaaaaagagaaatgcaatagttggaagaaggataagtgattcagttaagtttgacagtgccataggatcaagtggtgcttttagtggttagcaaactcactctcatatttagcaaggttaaaattacatgttgtttgtttctgctatgaagtttcattttatttcctgtcttttgccctcataagtgcttaatgaaagtttaatggttatgatggtaagggggataaacactataatctgaaaaaatactgtattataaccagagagccagatttcttttgtgttttcagagtgcttagtcaataattgatgctcagtaaatgtttttagaacacatgttctgattatattgactagttttattatccaaatcgtctccatcatggctaactttctgacaagggcatgaaagtttgataatttcaattaaaacgttgggcatacagcaaaaaaaaattcataaagctgtagaaaaatacatctgtaaagtggcttacctggtgatgttatctctggtgtcttcaatctctgactttccttttttccttctatctctgttgcattcccatatgcaaatatcttaatagtgctaaaccattgactatgaaattggtttgagtggtagtattattttgacataaatgattggaagtttatgtaaaaaagaacatcacacttttatagtctacgtagtagtatgtgcatgatattcagttacaatttttaaaatcgaattgagaagacatctaatatcccataagaattctattaacaagcatcatattccaagggtatatttgcacagtaatgctatagattattaaaataataataatataaaatccatgcccatattcttattttacaaatcaagtatttctagctatcagattattatttactttattagaaattactgagtattgattcagtaacattacttagaatgtcacagctttgtttgacagtatatcggtatagctacgaaaattatacctgatcaagactctgtcatcttagaggcactaacattagttattatacttcattactcttgtaatacttcctcatgagaagacactgacctctccaatggtgtttaaaggaaaaaaataagtaccctatttctaatttactgagttagtctcatgtaaaatgtctctctctctctgaaccagtactgtaacaatcaatttcagttctttcgtataggtaatacaaaattaataatgtagataaactaattataaaaaacattttaaaatgcattttagggaaaccttacaagaaagctaagacacacatgataacatgaattttaaggcaataattttccttatcaaatgtatgaccgtatcttataacaaaatgcatgtccgtaaatccaatcccgtgttaaaatataaggttgaatatgatactttttctgaagaatatggagaactatcctgtttaatatttctgttatgaacagaatttctagtggatttctaatactagtagatttctactggtacatctggtagtactctcttattcattggaagtaatgatactgtatcctttaacaattaaatttttatctaagtcatatctagtaagactaaaaaagcactaaactatttttacataatggtctacagttttggcacactgaggatatttaataatggaaatataatgtgattaccaagttattagaaataaatagtgatgctcaaaagggctatttccatgaatctcagtgtaagaatgcaaggataatgtgaatacgtcagaaatgaaagaaaataagcatttcctcaccacctaccaaatctaagcactgtacaagctgaagttaatgtattgtctcatttaactctagtaataagcatgtcttagaagaagttttaaaatagattgagggggtgcatgtgcaggtttgttacatggatatatcgtgtagtggtggagtctgggattttagtatatccataatctgaatagcgaacactatactcaataggtaatttttcacccctcacccccctaccagcctataatcttttgtagtttccagtttatattattccactctagatgtccgtgtgtaccctttgtttagtttcttcttataagcgagaacatgttgcatttaggtttctgtttccaagttacttcacttaggataatggcctatagttcctattcatgtaactgcaaaagacaggatttcatactttcttaggctgtgtagtgttctgtggtgtgtgtgtatatatgtgtgtatatatatgtatgtgtgtgtgtatatatatatatatatatatgcgtatatacacacatatatacatgtgcatatcacattttctttatccaatcatttactgatggacgcttaggttgattctttgctattgtaaatagtgctatgataaacatacaactgcaggtagctttttcatgtaacactttttgttgtttttgttgagtatatacccagtactaggattgcaggatccaatagttgtgttttaagttctttgagaaatctccatactgttttacataatgtttatattaacttacattcccaccaagagtgaataaacattttcttttctccacatccttgccaacacctgttgttgtttgacttttttaatgacaggtatccccttaaaaaaatgagatactgtcatttggaacaatgtggatggaactagagatcgttatgttaagtgaaataagccaggcacagaaagacaaacatctcttatgttctgacttatttgtgggatctaaaaattaaaacaattgaagtcatggaaatagagagtagaaggatggttatcagagactgggaagggtggtggaagggaggtggggatggttattgggtacaaaaattacagttagaaagaatgaaaagacataatatttgatcatatcatacagtaactatggtcaataataacttgtacattttacaataactgtgaaagcatataattaggttgcttgtaagacaaaggacaaatgcttaaggtgatagatactaaattctccatgatgtgattatttcactttgcatgcctgtatcaaaacatctcatgtaccccacaaatacacctactctgtacccacaaatttttaaatgacattgaaaaaaacaaataatagccatactgattggtgtgagatcatatctccttgtggttttaatttgcatttctctgatgattagtgatgttgagcattttctcatatgtttgttggccacttgtatatcttcttttaaaaaatgtctgctaatgtcctttgcctactttttaatggggttatctatttttcttcttgttgagttacttttagattctagatattagttttttgttagatgtatagttcggaattgttttccattctataagttgtctgttcattctgttgattgttttttgtttttttgtttgtttgtttttgctgttcagaagattttaaaattaagttccatttgtctacttttgtttttgagtacttagtcataaattctttgcccaagccagtgtcgagaagagtttttcctaggttttcttttaggatttttatattttcaggtcttacatttaagtctttaatacattttgagttaatttttgtatatggtgatttatgacccagtttcattcttctgcttatgactatccaatatttacagcacaatttactgaataggatgtcctttccccagtgtatatatacatttttttactttgttaaagatgtgttggtcatagatatgtggttttatatctgggttcttaatttggttaaatcaatctatatgtatctgtttttataccagtaccatactgttttggttactgtagccttttagtataatttgaagtcaggtaatgtgatgccttcaactttattcttcttgcttagcattgctttgactatttgggctcttttttgattctctatgtattttactatctttttctaattctgtgaaaaatgatgttggtaatttataaggactgtgttcaatctgtaaattgctttgagcagtgtggttattttaacaatattgatgctcccaatccatgagcagggaaagtttttccatttgtttgtgtcatctatgatttatttcatgggtgttttgtagttctccttgtagacacctttcacttttttgtttaaaggcattcctaggtattttttttttttgtagttgttgtaaatgagattgagttcttgatttggttctcagcttgatcattattggtgtatagaaatgctaccaattttgtacattgatttcatatcctgaaactttactgaagtcatttatcaaatatagggtccttttggaggagtcttaagggttttctagatgtaaaatcctatcatcagtgaagagaaatcatttgactttctttttcccaatttggatgccttttatttctttctcttgcctgattgctctagctaggacttccagtactatgttgaattggagcagtgaaaatgggtatccttgtcttgttgtagttcttgggggaggggggtgctctcaacatgttcctgtttagtatgatgttggctcttggtttgtcatatatgacttttgttattttgagatatgttctttcaatgcctagttgttgagggtctttatcttggggagaggctggattttatcaaatgccttttctgcatctattgagatgatcatatgttttttgtttttaattctttttatgtggtgaatcacatatattgctctgcatatattgcaccacacaaaacatatattgtgttatgtggtgaatcacagatattgctctgcatatatccctgcctacctggcataaagctcacgttattgtcatgtattatctttttgttatgcttttgggtttggtttgctagcattctgttgaggatttttgcatctatgttcatcagggatattggcctgtggtttcctttttgttgtgtccttacctgcctttggtatcatggtgatactggcttcgtagaattaattagggagaatttcctcttgtttgatattttgcaacagttacaataggattggtaccagttctttgcatgtctggtagaattcggctgtgaatacgtctggtcctgagctttattttattgggagatatttattactgattcagtttcactatttgttattggtctgtccaagatttttgcttcttgtggttcaattttgggagttgatatgtatccaggaatttattcatttcctccagattttctaatttgtgtacctagagatgcccatagtagtctgataatctttcgtatttctatggtatcagttgtaacgtcacatctatcatctctgactttgcttatttgattcttctgtttttttcttggttaatctagctagtggcctattaattttgtttatcttttcaaagaaaactctctaatttttttaattttttgtcttttattatctcagtttcatttagttctgctctgatcattgttatttcttatattctgctagctttggtttcggtttgttcttggttttctagttcattgaagtacaatattagtttgctaattttagatctttctatctttttggtgtaggcagttaatgctataaatttccatcttaggactgcttttgctgtatcccagaggtggaggtatgttgtatgtctctttttatttgtttcaaaaagttttaatttcttccttgatttcattgtccaaagatcattcaggagcaggttgtttaatttccatgtatttgtatagatttaaggagtcttcttggtactcatttctagtttttttccactgtggtgcaagaagatgcttgatatgattttgatttttttaaaaatgtgttaagaaccaccttgtggcctagcacattttcaatttttgataatgatccacgtgcagatgagaataatgtacattctgtggtggtagaatagaatgttctgtaagtgtctggcctggaaggatattaatacttgattttacagacaaatagatgtgttcaaagagtttaaggagttgttcaaggtaacttcagtattaattggtagattctgattttaactttgacctgtctgcctttgagaccatttctctccattttgagattccagtgaagcttgactccacctgagatcctagagactagagcagttgcagagaagtgacaaagagatttgaagatgttgtggcatttggattcccaggattgggaatgtctagatagaaggtacagagactgtgtgcatatgagtcttcaaacatagagtaagcagtagtggtagctacacattaaatactcagaatcaaaatgcttaatgaaataattcatcaccattactcctgtagttctttaaaatagaggaaaaagagactataagggaaacaggaatataggcttatgataagaatggcaataccgtctgagcaggaggataatcattggaactgaatttcacaactatattctgttagcagcacaatgcatagcatttcctctgtgctctgcctgaaactttccaccccaactctctcccaataatcttcttttctttttcaataattattttcagtaaaggcattttataattatttattcaatgttattggtttttaatctgattttaattctgtaactatatgcagaatgtatgggtgggtgcatgcatggattgtagaaagagtaggaaaggcaagagaattgagggctaccatttcgtgattagggactgtcctcactccatgacatatgtctgcccatgcaaatttttctgtgataaccatcagatgaggtagtttgaacctacttttattaatgtagtgtaaataaattggaagttcaggtattatttaaggatttaacacttactgtatatttctccagaccttaaaactttgctgtaacttcacttgttttcatgacttttcaaaaatcacattctcttcctgcacttatgatgtctattagaaaggatgatagtcagaatgtattagatgagggtaaaatagattagtattaggttaggtcattgcagtttagtttcaaaactttgatataaatatggctaaatatgaattctttcaactaattagatgctaatatttttggaatttatattgttttccaggcaaaatgcaaaacagttttaccttattcaatcttcttaaccacataaagaaataggcagttttattatcttagttttacaaattaggaagctgaggcttggtgtggttgatgactttctcaaagtcacgtgattggttattgatgcttccaggaattacacatagaaaatctgatttcagatgctacacttttgactacagttttactgtctcctcatagtcatgcacaagttttggtcaatctatttcatcctatgtccttttccatatgtaggagtacattaattgtctactttatttttaaaacagtttcttttcgtatttattgagtccccttcaggctattgagaagcatttagtgtgcttgtatagcctttcaaatctctccattgaaacagtctttcagaacccccatttggtagcttaggagttggcagaaacataaacattcatttctaacaaaaagataaaatcagtgtgttctgatataagaactaataaagatattcaatcacatttaagtaagtgaatatcaaaagcttttctagggtagcctgttgaggaagattatttaaaatattcagcaaatttataacaaagttatataccgtaaatagatcttcatggaaagctagacaatactgtgaccagccaggcttagcaaagtgaatatttcactgcaaataaaatcgaaagtcctttccagatcatatcattcaggccagcaagggatatagagcctagcccagtgtagaggtggtagaaggaatggggcatagaggaaaagagtgaaaaaaataaattacctaccaccccatcatttcccaagaaatcctaacactttctgatctgtacttgaagtttttatttgaaaaaaagtcaattcctgtccagatgtcttgaattaacatgatcattagtatctagggatttttttgttcatgagacagcttttttaagatacttctttcctggatgttagactcaactctattcctagaaccttctgaattcttaatgtcctttgcaaattttatgtttgctacaatttttttctcgttagtctttccttatgtgtgcatttattgagataaactacaaactactgaatatttgtaattaaacatctaaatatattaattttaaagtcatttttggagacaatagattgccttccaattcatgatgaacagcgttctgtgttgtttctaggggtgtgttttgtgtgtgtgtgtgtgtgtgtgtgtgcgtgtgcgtgtttgtgtgtgtgtgacctgcaagtaccggcaattagctgttgggtattcaatgaagtcggaggagtagttaaaaaaaaaaaaaactttacatataggtaacagctgttcttttcctgttctttccatagctgagtctatgctatggccaaaagaaatagacaagtaaaacaaaagcttctcccatcgaatttacaggatacccatccttgtttttgttttctattatactgcctttcgattaattattgctcttcacctttaaacatcaaatcaaaaatttccctagccttacataattccatgtctttatttcctaagtattattttacatgtgttctaagaaagggtaaaatagcatagatctagaataaacactgaagtggctctccagtggtttttctaagccacttttgaaaaccaacttgacatggacaagagccagaagaattcagtatcactgatggcatttaaaagaagtacaagaaaagtcaggtttaaataataaaattgggaacatgtactaagggagtaacaaattttgttaagccctttaactagagacttatttagaagaaatacaattattcacagaggtataacaaaaactgtttgtccaatctaggcattcttaatgttacatctcactgttggccttttctcttgtcataaagaaaaaaatacattatttgacatttgacaacaaacattggtaacatttgtatctaataatggtaatgaaatttaactaggaacatgatagatgtttgaaatctggtaagtgttacaaaagcattcctttaataaaataatgaaaataaatgcataataaagtacctagtatgtgtgtatatatgtgtatgtgtatgtacaatctggaagcttttaataaaggaaaacattttaacaatattatattacaatattttaatttgaaggtattattttctgacagacaaacatttttgtgtacttctctagggatgcatctatatttggaaactatttggctcatatttcaggcttaattagcaaatccaatataaatctccgttgtataaattcatctatgacaaattgaaatccataagaagtcagtatttaaaattgtaattaaatatagccttacaacactttagcatattattttttttaaatactcttgagaattcatttctttccaactggagaaacaggcaggcattctttaccccaatgatcaaggcctttattcatggattcctagtttggcagaacaattgaactttttaactccagctttttatgtctggcgtttctgctacttgtaagaatcagtgtaaaagtaaaccctgaacgttgcatagttcataatctgtattttgctgatattaaggagattagctaatacagttatattcactaatatttatttcgcatttgaagtctgagaaaataggagacgtgcttactgttttaccatagcttttgtcttacagctatttagtgtgctcaaaaaagtcagtttaaccttttttagtttaattcctaattagctgagaaagaagaaatacaattttaaaaagtcatagaggagaagagatactggaaataacattaaatcaaatgtaccttatgcaaatctactccagcactctggactcttcaacgttcttagtcactgtagagagcctttccccactcctttatttccttgtactcaccgtaagtccagagggttcttgtgttagattttaatgctatcatctcacaactctctttagtggtactttacgttagcacttctgccaagcataaaatataaacccttgatcaatatggcaagaatgccatttccaattataaaacaaatagatgaacgaaacaaaatcagaacaactaagtaatggagaatatagtacgtttgatcacatagactttaaaagactcaataagagttggattcattccatggatccaatgtttttcttacacttcttaagtaaaatatattaaaattgtgaaaaagcaatttacatgtaaaaatgaaaactggcattatttacttgtaattttgtaatatatgtaattatatatactcattgaaggacagaaaagaattgactaaattcagaaaaccaacttatgatacactggccaccaaattatcattttaattattatttgaaacattcccggctgacaccttcaaaatgttcccagtcctgtcttatataactcagaaaacacagactcaacatgactgtcaaggacaactctgaattttaatgtttccatttttggcctcatggcaaaaagagttttattaaccattataagctctggaatgtcaaaggcatgataggcagtatagattgcacacacaaaatagatgcatagtcattttattctaaattgcttcacttgaaaatgtagtatgaaaatctagagagacgaagtaaaaagaagtgattttatagtgttctaaaatgttgaggcttcgaaaataagaagcctaggataaaaatgctcatgcatttgagattgtgattcagccatcctaataagttcccttccacctgccatagagtttgaatacctaagagctagactgataggtgctaagcactgttgttttgcaagtagggacagcacgtttgccagaaagtaacgggaaatgtcccaaacttgtttctccactcttgtgttatgtaacaaaatgttctaagaaacaaagtagttgcctagaagtctcaaatagctattcagagaaatcccaataataaatagtgtaacagggtaaggtcttatgggatctggagcacccaggcaacataccttggttctagagcagcctcctttgtttacccctaatttattcctgtgtttacccctgttcatcattacaaaataattgtacatcatgtttttaaaaagattggaaatactgttttgtgacagcctcacttaatagggggaaatgattttttcagagccacatttgtaagttagaaaggcagtatttgaattattctggttttatcctagggttcagttgagaccaagtggttattttctgttgaggttagtgtaattgtgattacaccaaaaatcactaattcttcctattatattgtaatctttgtgcaatcaggaaggaacaaactcatctgtgcatgttttccccaaacccccacatggtaccatttatctgacaaatgtttattgatctttatttgcttgtaatacatagtgagaaggacagagggcatctctgttctagtggactgcctattatagtaagtagagacaaaaggactaagctgatacataagaaattattgagtagtgacaatactatgattaaaaaaatgacagaaatggtgaattactagggagcaacattggatagtttgctcatgaaaagctgctctaggtaggtgacacttacattgagtcctgaatgataaagaaatgatttaaacatctggaagaaaagcaatcctggtagagggaacagcttgacacatttttggaagagagacaaagcaagtcattctgaaacactgtgagggcgagaatggtatacaattagactggtgaggtagtcaggtgctagatcatataagaatttcaggtagagaagttaaattttctttcttagtatgatagaaatctattggtttttataaatcggactgacatctgatttgtagtttgagcggaagggaaaaaacgagtaaaggagctaaaaagtagtgtataggccaggcacagtggctcacgtttgtaatctcagcactttgggaggctgaggtgggtagattacctgaggtcaggagtttgagagcagcctggccaacgtggtgaaatcccgtctcaactgaaaatacaaaaaattagctgggcgtggtggtgtgcacctgtaatctcagctactcgggaggctgaggcaggagaatcccttgaacccggtaggtggagtttgcagtgagccgagatcatgccattggcattccaccctgggtgacacagtgagaatccgtctccaaaatagaaaaaaaaaataaaaaaagtagcacataggtaggagggtaatcaagagaaggtgtcaagaatgagggagtggccaattaggttagtaatcaacatgtcaagtaagacgctataacaaatggttattgaatttaggaacatgaaagttgatggtgtcctttacaaaagatatttcaatgggttagtgggcaaagtgaatagtaggataaatatgtaggcacagtaactataggatacatttgtttttttttttttcagtgaagaggaacacataataggacagtaggaggaccggtttgttggatcaagagtttgttttatttttatggtaatggagaagttcagtagagaagaagagcctgaaaatgccagaagtgctgatagttgtaggaaaaaagtccttgaaagggagaaagggggtgggatgagaaggagaacatcctgctgtacctttcttaacatttgtcttctctagatactttccagttaaattaacaatagaacatataaattttgctgagcgtcatagcagaaaattggcttggaatggttttaggttaataaaaaatgggagtacctgagatgtagcagaaataaatttcaccatttgagagcaaatcatttcaacacacatgtaagaatatcattttaatttcctttaaaacattttatctttcaggtgcttcaagaagatctagaacaagaacaagtcagggtcaattctctcactcacatggtggtggtagttgatgaatctagtggagatcacgcaactgctgctttggaagaacaacttaaggtcagattattttgcttagtaaactaaatatgtcctttaaaagaactataacttgaaaagtattttaaaaatttagaatgcaatttatatattaaaatacttagaatacaatatgtgtacaatatacacacactcataatcagctgaagtgctgtgatttaaagaattccataattctgatacaatagtaactaactgcggatgggtaaaatctaatactttaccagaaaatttcaattaatattaaataaggctgggaagcaggggttgaagggaggttactggttaaaaaaaatttaaatgcagacatttttctaaggcatggagtatttccatttaaaataacaattgaaagcacccatttcatcattagctgacccagtgtgaatagcttttcaatataattcatccaaggtgatgcttgtgtggttaaggcatcttgaaaaacagtccgtagaactcacagatggttgtatggtgggcctatactcttctgtatttgttttctacttgctttcattttcaccttattttctgcctttatttctttggcccaaagacatctactaaatatcggtaaatgtactgattatccctaatttgcttaaactctatctgcatttgtccatgattgcatacccctttaatggctactgccttccagcctcctcttttgtcttcaatcttctttcctcttttgatgttctcattttgcctctatatagctctgtagtgtcatgtgactttaagataatctagactagtatctaaaagggcagcattaaaaggaatcaagtggagagaaagcccttgctataacttttctttgattccatcccatcagttccttcagtcccaaaagaatccatgcttgagttctatactttatttaactattggctggaattgtcgtggaatgctctgcttccatttgactttgaaacagagatgattcttaggttctttgcaagtgatataatcttgtcttacctagtttactttttaaaagcaagaagaagaggacgagaagatggtacagaaggaggagtaaggagaaatcataaagtattaaaagattgataaagtataaaaacataaaaaaatttaacacaaataccctgggtatattataattctagggtagcttcagagactgtggactttaatatgtttaatactggactgagagggattctggtagacgtaattagaagaattacaggaaagagaaacaggtatttggatcccctaaaagaaaaacaatcatcaggactcagagaaggatcttagcaggctttttattagagcagagtctggctatccttaacttattcctcaaaacctattagtgttgagtgcccatctcacgccttctcttccttcgccctggcatccctcatcaccacaattccttcatccattgcactaaaattctgttgaaatgccatccagaggctcaaaaaggatagccagctgtctttggtaaagaggtacagatgggggaaagtaggaagggaagtccccatttagtccaataaggaagagagatgcatacttaacaccctgagttagaactctaaaaatacttccaataggatatatctgcatgtattgatttattctgtaaattctattatgatgatattttaggatttctctaactttaaaatacctttagagtcttctttggaaaaggtttgaagaaaaccaaagacaggtcagaatatatgcttagagtttctgaaagatgacatagcttatgaagtgtaatattctgaaaagtgtgctctccgataattagattctttctctcaaaggttcagcttgtccctcagcaatgttactgcagattagagtcttgtccttaactttagaggcttccaggatgtcagtgcgtagagagtctgtttcataggcagtgatgccagttaacttatttgattgagaaatatttttataaactaaattttataactaaaattggtcatttatatagtcttcagttttagaggtcattaccacatctctttctaagcattccacatcccatttgaatttttttcaacaagtactcgttatgttcttactatgtcccagggattgtgttgggtaaccaggtaagacagttaaaaaaaagaatttgtcactatctaccctggttgcgatgggtaatttgagagcctactgccttccttggaaccctggaacaatggtgactatatctcagtctccctctttgtagtagaatgctaattccttgtcatccatggtcactatgataggcaggtaggcatgggaactgcgctcttggtacatgcaatccagtataaaaatagacattaataaagtatttttaaaaatgagcaaatgttaaagaatggatgcaacttatttataaaggcaaaaaataagcttttgtgacaggaaattactctgacttagactgaactttgaacgcaacagatgattcctgaggaaagttttctttaagctaagatctaaatcatacattggaggaaaatggataaagtgtgcatgtaagtgtcatgggatccttgggtgtcactttgccagccagaaacctctgtggccggcagcacctctgtctgggttttgcttgtgcccgctgggctccttgcacccactcagcctggcaggctgtgcttggcttgcactactggcccggatccccatgcctgccaagggcaagccaggcacagagcagtaagaggtatgtgagcaagcgagcatgaggcctggccactgtgcacagacaggcatgccagctgcagcggaaggcagctacaggcaccagtactggtggcagctccatgtgaggctgtggctggaccagatgtaccacaagtagcttctgctgcaggcaccaatgtctggacaggggatcgcggtggcacctgaaagctcagagacaccaggaaccacagagccccaaggagcatgttacagcatgccacaaccctggcttgaggagccccaaggtctgggctctgcaaaaggccacagctcttctctgtttctcattgcccatagcatggtgagtggggggcatgtttcagccctgtttgtgttacagctctttttgtcctgccattcagcaagtcctgagttcttgtcccatgtccaggaagaatgaggtacatggacaactggagggtgagcaaggtgcagaggagcttcattgagcgagagaacagctctcaggataccacggtgggtagctcctttccacaggcaggtcgtcccagggagtgtgcagctgtgagtagagaggagacccatggtgggtggctcctttatgcaggcaggtcatcctgaagagtcaaggagacacaaagtaggtagctccttcctgcggctggtagtcccaatgtctaagtttgtctgagtctggggtttttatgggctcggaagggaggaggtacattctaattggtccatggacatccatggataggcccagaaaaagcaccataagttctcattctgggccacaaactccacccagaactggcagcccagcccccaggcttcaggccattcttggcttgaaggaggggtttctctgtggatctgctcctttctgcccaggagccagtctgcctcctgccaccatcaacatgccatccatgtagcctaggcagtttataccaaggggtacctgcaggcccacaccgaaccatcctcagtccccactcagcctctctcccatgctcatcagtgcccaaagtccagacgggcgcaaggcagcagggggctggcatgccagcactgtcccgagcacacacataaccagtcaggttgcgacaacacctggtcttggccgcaactttgcttctcccaggagccagtgcggggagcgaggagatgccagggagtgggagcaggcacttcttagtatgtggaggcaggggggcttcccaggcccccaagagcgcaggaatgcccaggtccggagctgtggctgggtggctgcagctgcacctggaagcatggggctcccaccctgccaactcagtagggagcagcgctcctgcttgttcctggcccttggtggctccacacagtgcacagccctggccacgcctcccttgctgcagctggcatctttgcagtggccgctccagacaggctgctgctgccatcataagtgagattggtggaggtgggtagagtttctaggatggataaatggtaaatcaagagagcgtggtttataaaaacttgcatgaaaaaagactataaaaagaccataaagaaagccttttgttcttgggagataactgtttctaataaagaaagaaggagaaacatggttaagcccatagcttatagaagatgctctaatgaaaatgtcttccaaagaaaaagcaaaaccattaaaaccctatttttaggtatgttattctgtacaagttaaaagttgagagccaactatagatgtattgaaggtctgtgtggtcatagaaccaggagaatttctgccatataaaaggcatttgaattattttgttaaaatactttaatattgaagttactgcctaatattttggagaattaaaagtatatgaaaagaatgaggctaggtacagtggctcacacctgtaatcccagcactttggaaggctggggagagaatattgcttgagcccagaagttcaaagattagcctgggcaacatagcaagactatcatatcgtattttgattttcctaataaaaataattataaagaatggataaagacagagtgtattaaggttctctagaaggacagaacccactggatggatggatggatggatagatagatgtatatatgtgtatataaaatatacatttaggagtttatcatggagaattggctcacatgattacaaggtgaagtcccatgatacgccatctgcaagctgggagaagagagaacctagtagcctggtgcagtccaagtccaaaagcctcaagaccagagaagctgacagtgcagctctcagtgtgaggccaaaggccttagagcccctgggaaatcactggtgtaagtcccccagtccaaagactggagaacctggagtcctggagtctgatgtccgagggcaggaggagaggaagccaactgccccgcagggcacaggaagagagtgagtaaacttaccaagcaagctactttatccctgttctcctggctttgttctagtctaactggcagctgattgggtggtgcccacccacattgagggtgggccttcctctcccagtccactggtccacatgtcagccttctttggctacactctcacagacacacccggaagaaacaatacttcatcagtgatctaggcatccctcaattccatgaagttgacacataatattaaccgtcacaacaagtattctattttcaagaaggaaaacctggaaaacacaattttggatcagattattaaacatgaggccatgctcactggtatggtttctcacttatctcatgcagttaataaacatatttattgcctgaaggaataatttttgcagatgagatagttttctaagaactaagctacattcgctaaaattgagtcatgtaaaccaactttatatcagatgacattaaacaatttgtagaaatactttgtggtagtattaagacaaattattttgttagacttattaaattggctgatccaatggaatggaatgaatttgaggtattctgattttcctgaaccttttagcaaagcctctgcgtgatactgtttattggtaaggtgagtctatctttctctatgagtgttcgtgggtgagtctgtgttttaatatattcctttctagtatctgatttacgtgctgaaaattctggggaaggaagccatttgaggatttagctggggctctgtgtaaagtgtgcccctgtaggagtggttaatggaatatttctgctcccatattaacttagaaggtttatagctatgtcctgaggagttagaatatcatatacaaatgttacatcctattgttttaagtcagaaaactcatgtttatagttcgaaatgttgctgctttttaaaaatgcaagtagtataaatcagttgaattagtttgagatacaaagggtctgacttcccatctatagatataaatgtaaatatatataaatgtaagtgtgtaaaaatacatgtaattttgtctatataaaaatatatgtataaatgtgtatatagttaaatttatatacatctctttatgtttctatatatatacatacgtacatctttgtgcatatgtatatatatgtatatacatacatatacataaacataagcacatatgagatagagtgcacatgcttactttgaaacaagcttgatattaaggatgatacagattcttagttaatgcaatcacagactgtgatatagtgtctagattacatgaactaataattatactctatgctgatttgaatacactgtattttacgcccacgattggtactctatcttagcaggattttctcagatggcagcatcctgtgaagaatatttgtagagtgggcgattatttaattaaaaaataactaatcatagggaaatggcacatgaacactattgtgatggtgaaaaaggaaggcactttctctatggtttttcaaaatgtcataatatcagaagcagacagaagttggtaactctggatgtcttctgcccagatctttcctgagtccattttcttctaattatcttctgaacacatccttgaagtccaaacaacacttcaaactcaacaagatgaaacttacctcactgtacattgccttcctttaaacctgctttccttactgaatttcttatttttgtcattgcactggcacttatcatgacacctgtaccagaaacctagagtcatccccaaattcatccctgtcctttcccttatgagccctttgcatgcaatgtcaaaatatttctcaaccttatcttgtatttattatttcatctttgttcttgtcaacatttctcaaggtataggccatatcataagcccccaaagtccttgccttcagtcttaccgctcttccatccaatctccacattgaagtcagtgtgggttcccaagagcctgtttaatcgttctcctttgcttaaaatcctgagtcactttccagattctgatactttggcctacaaggtatttgattacctgactcctaccagtctctatagacttgtctcatgttatctgctttatgtccctcaacctgcatttgattcatacaagctgtttctgataccctgtatgttacgacctctttgcacataccaccgggtttaaacagacgactctgcttcataagatctgctttgataatttcatctatgtatagaaaactcatttcaagttttcctccatgaaattggccactctacctagtgatgactactccctctttgtgccatgtctgtaccctaattgtgtctgtttgggcaccgatcatatacttttgcagttaatattaatgtgctttactcttttattagaatctaaattacatgagatgtgtcttacacattcttgcctgcattgtcagatacaagtaatcagtaattcttgtaagataactgaatgaacctatgaacagacggttggatataattccaagaaagatttttttgacttaaaagggagagctttttgttgtaaggtaattaagaggagaaactctagaaatagacccttcctgctctgttccttatctacagtatacctttgggcaagtcacttaaccatccttggctttagtttccccatctttaatatgaagattgtattagaacctacattatcagatatctgtaaagggtaaaagggtagttgagaagctaaagcatttaaaaatcactgaaatatagtaagcaataataatattagttactattattatcatcatcagcccagagcattcttacaatgcgataagagctgtggaaagtggtgagctgttcttcattaataatatttaacacaaactggaatctcatgttcaagtatgttttaaaagaggtgacatactgagtgggaagttagacttgatagcctccaatgtcccttccaatacaggtggagtgcaagaaaataaaaggaaatactgcccaatcttatctagtagaagcataattctccctcattctgtagagaacttcagctttaaaaagcatgattctcaaaattactttcataagaaaaaacaatctgaatataatggcaaaatataaagaagtcaaatactacattctgccaattattttgaccaacagtgataatttttaaaggtgacaaatctggataagtagacaataagaatgacagacatttaatggtaacatctctttggacattgctgttagtgtcgttaatagttttaacttgtgtaacatgagtatcacacaggttacaaagggaatgtgctatatctcagttacaaagagaatgttaaaataacaaagccacttggaaagaaaatgctatactgtgaaaggtagttgttcagaaagacgataaagtcagatttttctctcatcacctaaatgtcagttaggtaactgaaatttttatagtacatatcttcgggatagtatgagaaagaaaattttatagaatgttagaccctatcaaattaagaaatagaagttatttatgaagaggaatatggttgaaacattttgatgtttcgctctagttcctaattttatatttggtgaattaaatgcatttaaaaaaaactttaaatgtgatggaaataatccacaaagctaagcatcaacatttgttgcccaagaagcaataattataattattagattattatttttcaggagttttacatgctttgtatgtaatgccaaccctatatcacaaatgagaaagccaatgcataatgaagttaaatccaagttcatatagcttgcaggtggcaaggctgacactggtattcagatgtgtgacaactcaacctgagatttctcccaatctctcaaattcatagtagaaatttgctatgtggccttgtgaaaattatgtgatttttttcagttttggtttactaatcagcaacgggggaatacagaaacctatgtaacacagtaatgtattcgtacctgtaaatttaactcattcatgcaaatactatctatctgtataaaatgcaatatctattcatatatatatgaatagatatagcatttgcatgaatgagttaaatttacaagtacaaatatatataatataaacatatatatttatttattttagcacctgtcccactcaattgcattagtacataaatatttttctcttctagaacaacactgttctagaagagaatggtttatatatgtatatagtttatataagcagtatatatatattaacacctgtcacactcgattgcattagtatataaaatttttttcttttctagaacgacactgttcagtaaggaagttgctatacacctttggctattttgagcacttgaattgtgactggtatgcttgaggaactggattttttattttatttacttaaatataaaatggcacatgattcagttattagaaaacttttgagtatgttttgatcagctttgatatgtgcattgttttttcaactgcacattgtatcaagtataaataaatgttgaatattctaatgaaatttgaacatccaaagccaatgtgctgtaagtatacagttaacgctagatttcaatttatgttaatacacggtctgttgtaatacatttggccaatagggtgttaggtagatttgaaagaacacaatgtctggattactcaatctgttttctattctgactttataatttatgagttgaacaataaattctctcatgataaaaattatcaaatgaaactcaaagataacagtgatcataatacccaccatacaaaattacaggggaaatataagcaagtatgctggaacaataatattctttttttttttttttttttttttttttttttgagacggagtcctgctctgtcacccaggctggagtgcagtggcgcgatctcggctcactgtaagctctgcctcccgggttcatgccattctcctacctcagactcccgagtagctgggactgcaggcgcctgccaccacgcctggctaattttttgtattttctgtagagatgggtttcactgtgttagccaggttggtcttgatctcctgacctcgtgatccgccagcctcggcctcccaaagtgctgggattacaggcgtgagccaccacgcccggccacccggccaataatattctttatgaatgcaagtgttaatacatttacaaaaaatttttaagtttattgatacataatatttgtacatacttatagagtacatgtgatattttgttacactgttgtatataattatatagtcttcctactctgctatcgaacattagaacttattccttctatctaagcgtatgtacccattaaacaacctctcttcattccatccacacactcttcccagtctccagtatctatcattctaatctctagctctatgagatccaattttttagctcccacatgtgaatgagaacatgtggtatttgtctttctgtgcctgcttatttaacataatgacctccagttccatttatgttgttgcaaatagctatatttcattcctttttatggccaaataacattgcattatgtatatataacctgttatctgtttatctgttgatggttctgaaaaaaaaatgcaaactttatggtactttttaaattgaagtatcaagcaaaggacataagttataattatagcttaaagacttattacagaagtaacatactatgattccacatccagaaaaagatagtatgttaccagcaaccaggaaacctccatcaagccctatggtatcataaactcttcccatctcctcaaaggtaacatgtatcttgagttataatgctgcaggttagtcttgctatatttttaacttgatgtaaatgaaacttttatatatgcagttttttaactggcttttttcactggatactatatttgtgagattcactatgttgcatatagcattactttattaattttcatcgctggatagaattactttgtatgaatataccacattttacatattctgttcagaaaattggggttgtttccagttcggaagcattacaaataattcatctatcaacataaattgtacgtatatttttgtgtatatatgtaaacttttgtattaggtatttacctaagaatagcatttcttaatcattgggtatatgcatatttagctttcaagatattaacaaagggttttccaaagttgtataaattcatattctcaccagtagtaaatgaaagtacaaactgcttcatatcttcttgaatacttgtttgttaaactttttaatttgagcctttctggtgactttataatgtcatctctcatttttcatttgtatatactgatgaccagtgaggcggaatactatttcagttgttattggccatttaaatgaactcttctctgaaatgcctgtttttctactggattttctatatttctcttactgatttattttagtttaaaatatatatattctgggtattctttgctgtttatattacatttttctttttgaatgggtaccttgccttttcactccgtaatgatatatctcttcataaacagaagtttaaatttaacatagttcacttcaatattttctgttatgtttagtgtacttttgtcctcagtttaaaaataaaactctctactttaaaattctgaagctatggtcctgggttgctatataggaactgtttgttttacctttcgtattacaatccacctattattacaggtatgaggaagggatgaatgtccattttttcccatatagatccaactgaaacaacaagttggcactgtagaatattgaggaaaagatggtcttattgcaaagattttcaataagaccatcctttcctcaatattctgtggtgtcatctttgacgaaaatattagaaataaaatgcctatacgtgcatggatcagtttatggactctaatcagttttatttctctacttgcctgtcctcatgctaattccacattgttttaattactatagcattatgacaagttttaatatatggtaatatttttttgagatggagtttcgctgtttctacccaggctggagtgcagtggcaagatctcagctcaatgcaacatccgcctccctggttcaagcaattctcctgcctcaacctcctgaatagctgggtttgcaggtgcccaccatcatgcctggctaattttttttgtattttgagtagagacagggtttcaccatgttggtcaggttggtcttgaactcctgacctcaggtgatctgccagcctcggcctgccgaagtgttgggattgcaggcgtgagctaccaggcccagcctgtatctggtaatattgtaaaagaaaaaatgcaccagacaaacaggcaagaaagactttattcaagactactgaattatggatcaagactattgccataggagagagagatggaaatcatttctactgaaagaaagacaggagagaatttaagcactgaggagagctagtagaaaaatactggaagatattagggggttaggatggtgattaggcaatctgtgattgttaattggcacttaatgaagttaggctcctactgtcccacagagactgggagataggcgtgctatcattaacaattacatttcaaagagatggctcctaggtccttgagaaagatattcccggattgtagaagatttacatctcaaagaggcagagaatatgtttttggttgcaagtttccctaaagtaagcgctctaagaaaagagaggtcaggagcctatagtcaaataaaagcctgtctagagtttagtcacattaagtttgttttggtcagttggtcagtaaaagccattttattttcttcctttttaaagattatcttgactgcttttggccatttcgatctccatatgaattttaagaacagcttgtgaaccctgcccccaaaaagaatctgctgtggttttaattggatttcatctattctctggatcaacttgtacagaatcaacatttttattatgtaaagtctttcaatcctttcatttagttaggtctttattttctctcaataatgttttatagtttttaaagtaaaggctcttaaactttctctgagatttatttcttgggtttttatatttttgctgttatgaatatatttttgaaatttcattttctatttgtgctgatataaagaaatacagttgattttttttcttggtcttgtatccaggtaccatgctacatttacttaataatttgaatacattatctgtagtattattcagatgtacatatataggttgtttttgagtaatgacagttttctttctccctttccaattatttttcatgtcattaattttccctgacatattgtactgtataaatactctagtacaatgggagtattgtggatatttatttctcattttaagtctcagagggaagaactttaataaataatcattaagtatgatctttcctgtaggtttgttgtagataccttctgttcttaatattctaagaggttttatcactaccggatgccaaattttatcatatatttttccagaatcatttgagatggtcgtatttttcttctttattctgctatatgtcaaatcacatgacttagttttctaatgctaaaaaagcctttcttcctgtaataaactaaacctggataagacgtataatcttttttgtgtattgctagattttctttgattcatagtttttcctttacgtccatgaaagtgattggcctgttattttcctttcttgtaatatgcttgctaggtttaagtacctgattatgcaggcttggtaactggcttcataactggaatttgcaaatgggaaattttaaaattaaatttttatgtatttaatacacataaaaatgtccatttttaattggaatttcaacattacatttttccagattttccgttttggagtcagctcgaatcatttgtgtctttctaggaattggtctattgcatctaaaattacagatgtatttagataaagttctatttagtccctatggtatttaatagtagtttattagctaccattgtttgaaattgaaaaaaatgtgacatgaactaagaatttctaacctctctagagaaagcaaatgatctgatgatccttagtctgtttttctacatagtaaccagagcaggagtcaagttgccctgttttctctagcacaggctcttcatttagccacagtccccattactacctattctgttacacctacattatcttatgcattttattaggtatgtacgttagaatttgtgatttcttgtggatgaaaagttgtgatgtcaagagttggcatgagacatagagggatatttatcttctatgcacttgctttcaaataagataccttttggagcccgtgctcagtggctcacgcctgcaatcccagcactttgcgaggccgaggcgggcagatcacttgaggtcaggagtttgagatgagaccagccaacatggtgaaaccccatctctactaaaatacaaaaaagagccaggtgtggtgtctcacacctgtaatcccagctacttgggaaactgaggcacaagaatcccttgaacttgggtggtggaggttgcagtgagccgagatcgcgccactgctctccagcctaggggacagagaaagactctgtctcaaagaaaaagaaaaaaaggatacctattggaatatggccctgttgtttaaaattgtaaaggtaaaaattttcaattcttgtataaaacataagctttatcaagtatagaaaaaaatgcaaaaaaaattatcattaattgtccttctaaaatgtttcactgtgttctatattaaaattctatcatgctccagatttatcacatctggaataaaggctgatttttttatcgactgagctctaaatccttactatcacaagcatctcaataattcatcacagatttaagagcactttcacatttattgatctatctgaccctagcagttacctgtctaggagagtctgtactattatctctatttcactggtgagaaaactaaagcacagcaagattgagtttgttcacagatattacaaagttgggcaacagtagaactgaagtgggaatgcaggaagtttatactttatgtaatgattagcagattgaaagatccaaaaaagatggttctaagacaaaagttgggtggggaaagccacctattgataacgacagtagtagtattcagttttgggatatttgtgcaagacattaacctcaaaggtaaggagcccacctcaaggagctcagagtctgcgaggtataaaacgataaggaagaggaaacctcaagctaccaaggaatgcctgggaatgtgatgaatgctggaaggaacactgttacgctggaatgctccttagaactcctgctctttattttctggtatcccaattgaacagactggtgggagctggagagtacagagtttattaagctgccaaaaaaaaaaaaaaaagacattaaataatatcctgcaaagaataacagcagtgacaacaacaaaaggcttttccagatttattcattagcactttgtatactcacacaaataaataatataggaaactgactgaaatagcgtagagaagaacatgcttcttcgtgttaaaatctcactacactttcagcacaattgcaaaggcagaatttaatgaacaaatcagtcatacttaccttttaaaaataagtcctgcaaaggccacatgttcttaatctggaagtgcaagtatttgctgacgttttatgattaaacaaatacagagttacagtgtcaaatgtttttgaatcaaattataacattaagcttcacatccttgtgaagcagattagattaaatgttaaatctagtcaaacttctgctaaaacaaaatatgaaaagactccaaagggattcggcatctggatatctcactgtaggttgtgtagcacaaattagaaggcatatcttttataatgaatgccctactgaatgaataccattatgaacgagcatgaacttgtagccaaatggatctgaggtcaaatcccagacactcagtactgtggcttctgtgacctcagacaagttacttaacctatctgtcagtttcctcatctgtaacctgcccctttggaagtgacagctaaaaattccttgagttcagacaggagattattacaggatcatttaaatagaagtaagaattatacttttgaaaaaacttccagtagttgtttcataactcatcaaaataggtttatccgccctgtaccatatgttatacagtgaagatataaggtacaccattttatagtatggtgcttcagttcagtttgtagaaatgtgtaaaactgagaaccaagccatacccttggctaaacactattcagtaggactctgccacatttctgcctcataatggatttttgtttttttcaatggtttttgatgtgatttccatttcaacatcagtaagagtaagttgcttatacgttttaactgcatagttgttgataaagtaagagaaaaatcaagaaataagggattttcagagggctcattacacataaaattcatttagcagagaagtgtattatagggtcttaacctgcaataaaataagatgggttgttttctgcctccctctttcataaagccccgttgctgatgcattgtgtggtccatggcacataattgtttccgccttagtggatatacgcctgggaacactctatctcttaacgccaatactgatgggcacagtttaggtttcatattctatccctggctccagtaaattcaagggtcaccatacttaagatttacctcccaggcttgtcagattttcctcagttacctttatccaaatgttcttttagtagccatttttcacttttgaattgaaatagcaactcaaccaaacaaaggaattcagatgagaaatgtccttggcacgtacaacaatatgacatgtgaattaaatgggaggaaaaaatcctccccgttgtggatctgagcatggacgataatggagttgtgatttagtccatgaaaatgttagacgaagtgagctgacctttagcttcacttactgctgagacaaaatgagaatataaataaaaattaacttcttttaccattttgtgagactttgtaattcattggttttacatttatgtgtagaatgtttagctctataaaaatatgcattattgctaaaagctcaagggattcctatacgtaaatagaaactcagagaaacagagttgaagttacatattttttttttctctagagaagaggtttctaatcctaatacagtggttctttaaaaaatatatgtattagccccattttatccaatttcttacacttgtctaacaattttgttatagccattcaggcaatgataggaaccagcatctttgagtgattccagagctgagggatatagtcttccaattgctttgcttcattctttgtaattcaaattaaggccaatattgctaagcaataaataggtaaatccataaatttaaagcacttcgtgtattatctatttatacttgtgcatatggcatcacaaaaatgtatgggcagatgtttacagcgtatgagcaagtaatttctaattcacttttccgcttacactgagatcagtggaaagcactatgcctgccttgctacagaagtgacttagattcaattcattgagtattttctaagagtaagataggtttaagcaatagaatatgttactaaaggatatgtgttcatgctgtcttgtgttggaaacctttaaagaatatacttgaagactaaacatttattcgtaaagatttaatgggtgcctttctacagtgaatacagtaaaatagatgacccttggcagttcttagatttgatgtaagaaccatgatcaagcaaattgtaaacaacgaccaactcttaaataacttgtttcaaattaataatactttcccatacatactcttgtttaacatttgcaattctttaacgggttggtattattattcgacagacatttagccaagtatttcttgaaaaagaatccatctatcttaattgtcttttgtattactcctttgtgagggctatcattaaaaaataacatggactggtggcttaaacaatacaaacactttctcaccattctgggggccagaagttcaagaccaaggtactggcaaggattggtctcttgtgaggcctctctccttggattgcagatgaatgccttgttcctgtatcctcacgtggtctctcctctgtgttgcacatatccctggtgttttgctgtgtccaaatttcctcttctcataaggatacccatcatattggactagagtaaccctaatagactcattgtaacttaatggtctatttataggctctatctccaaatatgggcacattccgatgtagtaggtggggcatagggcttcaacatggatttcatgggacacaattgagcctgtaacatcttctcttaatatttggcatatccagatatttggtacatatttgttatataataaattcatgatcaatgaatgaatgcattgatggctgtcattaactgtaacctagatattagctgaatcataaacttgctccattatttggatataaagaacactttaagtggcattttttaaatagttatgttaaataggttgcctatgtacctaaaagagtgtttaattacagcaatccctccctccctccctccctccctccctcatccatggttttgctctccttggcttcaattactggcagtcaaccacagtcagaaaatattaaatgaaaaattccagaaataaacaattcataaattttaaattgcatgctgttttgagtagcataatgaaatcttgtgctatcccacctctgtctcacccaggactgaatcacccctttgtccagcgtcttcatgctgtcaatgttacccgcccattactcagtacctgtctaggttcttagaaacactgtcatggtatcgcagtgcttgtgttcaagtcaccctagttttacttagtcatggccccaaagtgcaagagtagttatggtggcagttcaaatatgccaaagaaaaactgtgaagggttttctttatgtgaaaaggttcccaacttaataaggcaagaaaaaaatcgcatgctggggttgctcaaaatctgtggtaagagcaagtctatccgtgaaattgcgaagaaagaaaaataaattcataaatactatatatagggttttgtactacctgcagttttaggcatccacctgaggattttgaagcatatcccctatggataaaggagaactactctattagttttttgtgactcatacagtgaacaaaactgcaatattaaatgcatcccattagtacatctcagaatttcaataaatttgaaaatgttatacaacctggaataggggatctttatttggatttgtattcccactaaaattaataaattatacatttccacctatggggttacaagcttaaaatgctgcttcagtggatactatatgtcttgtagcactagagagaagatgctatatatacttgaaagtcttttttgtttatgaatatgatgctatagcttgagtttgtcccttcttcccttgactgtcttcttcactggagttgatgggctacaataaatttcccacattttgactttgtagatctgcatcatcacgtcaggtagatggtgtagtttatacttaagagataagattttctccatttgaagcttttttctcccacaactaatctattaaccattttgttacgtgccattttacctgacatgcactgacagggtcactaggaagttagctaaaaaaatgcaagtatgttttagaaaaaacctatatatactgcttcgtaataattagatggttgaagtgactaaattcattgatttaagctcgcacatttcctgtgggtatctcgcatcactgtttgagcgctatggcttttattgtaaacataattcaaaataagttgagtagaaagtgaaactacaaaaaattaacagttacattatgctgaaagcaataacattgatatttatgaagaaaaactgaaaactcacttatgattgagctgcatataagtacatgattatgttaatactgtaggaaaatgttgactgccttctgtttacccatgcgtgtatttttttttaagtggtgatagattaaacaatttaagaaacgtgactctcctagtcacttagaaataggtggattagggccaggtgcagtggctcatgcctgtaatcccatcactttgggaggctgaggcaggtggatcacctgaggtcaggagttcgagagcagcctggccaagatggcgaaaccccgtgtctactaaaaatacaaaaattagccagacatggtggtggatgcctgtaatctcagctactggggaggctgaggcaggagaattccctgaatccaggaggtggaggttgcagtgagctgagatagtgccattgcactccagcctgggtgacaggagcaaaactctgtctacaaaaaaaaaaaaaataggtggattattttcatgatgctaatttcatttgcattgtttaaatcatgtgttaatatcctctaggtgggttaatacacatatgtagtataaagtaacatagaaattatgagaccttagacactgagtagatttttcaaaaatatgagttataaacatttttctaactctaattctatataaaataaagcacgtcaatattttatgatttctagctttaaaggtccaatatatatatgagaaaataagtttcttatttatatgaaaaagttacaaaaagttgaaaattcaggctataaagtgcatcataatgaggttgagctaactgccattttgaaatgcttcctttgcatagaaagcatcacaatatttgttttccttccaaaaatcattgatagttggtttatgttacatattaaaatagtgtgtgttcttagacattagtgacatgttaatgatatagtagtttttactcagagattgttagttttctcactagagtagtttagaaacagaaaattttaatacttttgtaataattgagaaaattgaaaaatctacatagtaatagaatttaagttactaagaattttcttctacaatccaaatggtaggcaattctcattatgcaagattgtttcaattaagagtcttttgaggcattctatttagtagttagacttttattctttagggtgtattttcaaacctaaggaaaatacaccttttacttgttctcactgcaaaatcctctctatatgtatgtctttgttatcttacatttgctatggagccattttatatagtggtataataaccacttcatattgcttgtctctttgcttttctatgaaaggtacaagacttggtgagataaagacaaatgacagtcacaccacttatttaaatgtaagcagatcagaaagagtgtcccttccaacttctagcgtacataggagactgagatactttggcaaattattcatgccatttttaataaaacgtagttaccaattgtttgctgatgctgtgcttgattgtctcttctccaggtattgggagatcgatgggcaaacatctgtagatggacagaagaccgctgggttcttttacaagacatccttctcaaatggcaacgtcttactgaagaacaggtgtgtcatgtgtgagaaactagctgtaaaagacacggggggatattaaattggaaaagtaaagatttatgtttatttattccttggaattctttaatgtcttgcagtgcctttttagtgcatggctttcagaaaaagaagatgcagtgaacaagattcacacaactggctttaaagatcaaaatgaaatgttatcaagtcttcaaaaactggccgtatgtactttctagctttcaatggtcttataaaaacccagtactgtatattatcactattatttagtctcttctatgctattgaatattaaatgtttatttttgcttggatcatagattattcaaagatgttatattgctacttttctgaattaaagtgggaaaaaactataggtggattttcaactttgtttttcaaagttgtactcttgataaaacatagcataccagaataagacttcaattaaaattaataaagtaatactaagaaatgtctgtgagcctttcataaagttctaagcagcatagttctaaaaaaatagactgacgttgattctcagaataatatgtgagagttacaagcgacggttatcctgacattgatggagtttaaccttagtttattataaaggggtacctgagactgggactgggtaacttatgaaataaagaggtttaactggctcatggttctgcaggctgtacaagaagcatgacaccagcatctgctcctggtaagtgcctcaggaagcttacaatcatggcagaaggagaaggggagccagtgtatatcacattgcaagagtggaaacaaaagagataagaggaaggtcccagactcttttaaacaaccagatttcatgtgaactaactgaatgggaactgactcatcatgaaagggattgtgctaagccattcatgagacatccgccctcatgagccaatcacctcccaccaggccctacctccaatgctgggaatcacatttcaacatgagatttggagaacagagatccaaacaatatcacctagtttttcaagcaaaaaaaaattaaagcctatcaaatgacattgattataaatacctcgagtgttttgagaatgagatttctttggcaataaatggatttcagaaaagacttcattgaagcatttggtttcagcaggaatttccaagatttaaaaaaaaaaaaaaaaactctaaagtttctcttactctgtgaattttatcatttctagtaaaagaggccggtctgatactatgagtttaatttttcacgtgacatattctactttatgatttcttaaaatttttgatagatttgattaaatgttcatttgatatgaacttttataaaacaaaatggttgtaagtagtgttccataatttcacctttattattgcattgtacttcataataatgcaataatttctaaacttaagtaaatttttccactcattttaaatacgtaccattttaccagctatttatttgtttcatacattttttttgctccataaatgctaaccctcattggtcttttaatttaaaatagattcacttatgtattacttgttattacaagctagcttattattgataagaaattattgctcaaagaatatggactttattaagtgatgtgactgccgaaaatagagttcagaaaagtaacctgtatatgtttgaaaacacgagtgcaaaaatatcagctgtatttgtagttttggcctgcagctgatggggagccattgagagtttgcaaaagaatcatatttgcatttttgtaattctttttggtaggaagatgtttgatggtacgaggactaatcagaagacctgaactaagtagcattgggcattaagataagaagagaaacattagaatgttaagatgtgatgaatgaaacttgtgataagaggcagaagtttgaaatggttcctagacatttcatttgggtgactgggttcctaggagggttattagccctaacaggagaatagaagaggaattgctggaatgacaaaaatgataattatttcagatttggatatattccgtgtaaaatgtctttgagacatccaagttaaaaatcctttccattaatcagttggtttacacaactagaatctcagaaaatggttcatgactagttattgattcagaagcaatcaaaatgcttctgagggattgtgtagagtgacacattaagtgaaacgaatagatttcagggaggaatgtctacaatcaaggagtaggcagaggataagatgttgaccaaaagattgagcagataccacaaggggaaagtggtatcacaaaagtgaggagaataaagatttcaaaaaagtaggaagtggtacacactgtcacatgccacagagaggagaggataaattcatgagggattctatcatatctagaggaatggatgcatggattacatctccttaaagcagaatattccttacaaacattgttcttctcaggcaaaatgtgaatcctttcagtaaataagtgagtgaccactgattatcaaaatgcagtcatgccctctgattaggagcgaagatatattgctagttaaatacagaatcatgtgcttcagacggtcaatcataatggtgatggtcagtcatattctgtgtgctgaaaaagtcacaagcctgcccagattcaaggaaaagggaattagatttcatttcctcatggagaaacaccaaggtcaagttatagcaaagcatctgagatgaggatattttacagccatctttggaaagtaccacatgccagaatagtacagttattttacatgatgataaattccaaatcttaatatctagtcaaagttcctgcatatattgttgactagatttaccaatcaagaaagttgttcttaggaagccacaaactgacaaaatccaaatatgttaaagctagatgagattttgcatctcatctagtgtttcttcaatctcattacacatgtaaagttcattaggaccatctactcagtttgtttccaagagaaaatcgagatcaagaaaaaacacaggatctgtatcctacaacattagtatcagacttaaaatgaacactaagacatccagactcaggtccaggcctttcaatctatttcagtagtcctcatatcagttgattccttggaaaaaataactgcaactgagaactgtcatttctaacaataatgtgcctctatgttaacatttttgtgagcagaaatcttggctagcctcagggccataaaaatgctcttttaagaaagtcaataattttccaataggattaaaatttgtgttatgtcaccttgcttgtgaacaaagagaaaatatgttttctataggtcttgtcatttgatagtttaagccaattaacaaaacctgacagctggtctagaatttgaggtaaaattcctttgctgactcaggcagtgaataagaatttaatgttcattaaaatatgtcacaatctgagacccaaaacaggtaccatctgtcaccagttttcactacatgtctaggtatagatacactgtgctaaactctcttctctttacaataagtgtaatttgtttcaaaatagtatcactgataacccatgggattgtgtcctgcttgccattgaggtgggaggtggggattatgacatttaatttgctctagatctttgggattcatatccaaatcatgtagatctattattttttataatcaaaactgatttaagttttaaactgatttggcatcagggataaaaatgaagggaaagaagaaacagtagcttttatgaggtgaattataagacttgtagaatcacgtaaattatcgtgggaagatccaagtcaagaagaaacctgttcctgagtaaatgtatttctgctgtggggactgttggcgtttgctggggaaggacagctctggggaagcagggtgatccaagagattatggtatataagggctacagaagtacttaggaattgaagatattctcaaatggctgtgggatcaaaggacatggatgaagtgctcatggtaactgagcaagttcctgtttgacttgctacctttacctcaactcctgggatggccctcaaataattaattcagacaggatcaatgcttctcaaaatgtgttcccccgaccggcagcatcagtatcaaggaaatttgttaggaatgcacattgttaggccatcttcagacctactgatttagaaactctggaagtggagcctagtcatctgcattctaacaagcctttcaggtaattctgatgttctttcaagatgagaacctctgtaatagatcaacctcccaaagtacaactggtgattagaatgaattggagcacatcttacatgtagataagtaactacacataatataggtggaaaactcaattttgccaatataggagaaattgtcttggcattattctcttatgcgtattcctgatgagagtgaggtgaaggtttcctgggccttttgtaaggatacattatcttttcacttcaaatcatcttgaacagcttatctgtctcttctccatatccactactgacccagtctgatttattgactgtaccttcctccctaccttggaggtaggtctacattcctggcttctataaaaataaagtctgtttattcttttactatcccagctggcctttgccttgtacacattctctagatcttccttttgccacctgaattttctagagctctatgggtctctggcactcatagacctatggttaattattgatatgtagaaatacatattttatgcaataattagtaacaaatcatagttatttaatatgcacatgtaagacctaagcttaaaagaatcagcatcaatggatagacaggacaaggtaattctaatgaattctatgatctaatgtatctggccccatcatggattttctttcttttcctccctcagttaataatcctgggggagttctggaactgggagatgactactgaaagacagaaaaagagagagaaactgagaccaaacaactaatctgccatcatcatttttgatactcatatctaaaatttactaggtataagtctgggttcagtgtttttgtcatacagacatataaaaattcatttattcaataatcacacaatgtaattataacattgattttactttaccttgagtgcacttttttcctaattggatttttttttttttcttgagatggagtcttgctctgttgcccaggctggagtgcagtggtgtgatctcggctcagggcaacctctgcctccctggttccagcgattccttgcctcagcttcctgagtcgctgggaccacaggcatgcaccaacattcccagctaattattgtatttttagtacagacgaggtttcactatgttggccaggctgatctggaactcctgacctcgtgatccgcccgcctcagcctcccaaagtgctgagattataggcgtgagccaccacctctaattttatttttaatggtgactttcactttcatttttgtaatgcttaccaaatgtttcttcatgtggcttaataataaaacaggaggcttattttcatttgtttaggtaccatgaggttactcataggtttttattgcaatcctcttctttaaacataattctcacactcctcttctgacatgtttccaaatcattacatattttgtttaaataatgggtagaccattcagccttacacatatggctatttaaaatagtttctaacattctgagtaagtaagtcaaagaggattgtacttagattttttttttatttttagatttgtgtctttgtgtatattgtgcctctttccatagtaaagaaaaaaaatgacactataactggaggaatatacattgaaattcaaatatggctctcagcttgggacaggtagcatcaacctttgttctagtactaatgcaaatattcacttaaatttaatggaaaactaacaagtgaattaaacaaaatgaatatgcaaaacctatctattgggctgggtatggtggctcatgcctgtaatcccagcactttgggaggccaaggcgggtggatcacttgaggtcaggagattgagaccagccaggccaacatgttgagactcctgtctcttctaaaaatttaaaaattagctgggcttagtggcatgtgcctataataccagctactcgtgaggctgacaggagaattgcttgaacctgggagacagaggctgcagtgagcagagatcatgccactgcactccagcctgggcgacagagttagactccaactcaaaacaaaaaagaaaaaccacctacctattgctaaacccccacaccgtgagttttattttgatttgaattcagtgtataatatcttaatttgtattttggtctattgcattctttcaaacttagaaaaatactgaacttattgttaaggaaaaattagagatgaaacttaaatcttgctttgtttccccttaaaaatggcatgaagactgaactataacatactccaggtgaagcagattctgagtaaaagacaaactaattgaaggagccactagagcattctgcagttcagagctatcaatgcaggtgccatgccaaaatgggctacttagattgtccttttcaggaaggtgtattgactgctctaggtttggggcactttgcttcatgggcaattggtgcatttgtgtcatgacaatttgctctgtggtatgttagttcttaaataaacttacatttgtttcggaaagacaggtatcgcgatttagtttacattcattgtatttgctgccaaatatggggttgttaagtggctgtaagataattttctcctttatttctcttccttcttctcctttgtttacagattaagtcagggagtaatgttcagtacccaggaattgaatttgtctgtgtatcaggcaaagttactgagtcaagtaaaagaaaaactgccctgatttactgatttcacataaaccacttattcctttcaaatcaaccaaagggagtttgtaaccctccacagctcacaggaactttggaaatataaatggtataaaaattgcttcataagacacataagtatttataaactctgaaaagagatgctgaagcatttatgtcatgcccagcgacttagttcttttacttaatgggctctacaattagttttaaaaaataattactcaaataaccagatgttaattgattaatggatgctacaaaaattttatggtcagtaaatcacataatgagattttatctccaaataatgaaccgaatgttaaaactgtggaaacaataatattgtaattttatccaaataatcacagcatttcagaatggcaagtttccttagccattctcattttctcagctcactagcttttcttcagtactcctggtacctgattgtcagttttcgtttgaattccgtcaggaattaaggggaaatccaagatccgtgccttctaatttccacatgttgatctctgttttgccttttgaagcaatattaccttttcacttggattttcttcaaatatttcaaggtagctcttaattacctctagtaggtctttattctacgtttgagtttcttttctcttcttttctcttcaaacttcttgggataattagatagattataactttctacctctatttttctgaacttttgatcctttgcgggcacgattgaaatattttcttatctatgcaaatgagcaaatacacgcaaaagcagattgaactatagtggtgtatggaatgcaacccaggcttattctgtgatctttcttgttttaacaggttttaaaagcggatctagaaaagaaaaagcaatccatgggcaaactgtattcactcaaacaagatcttctttcaacactgaagaataagtcagtgacccagaagacggaagcatggctggataactttgcccggtgttgggataatttagtccaaaaacttgaaaagagtacagcacaggttagtgataccaattatcatgctacagactatctcagagattttttaaacctgcattaagagagtgacattataaccctacaaaagaagcaaccagattagtttttgccctgtgtttagttaaataaaaacatgattcttttgcctgtcttgttgttggagaatggtggtgaggtagagtgctaattaactgaacttgttactgccctagagtgaatttcttccagcccaatagtaacggggaactgagtgacttagagcaggcgaacaaaatgctgggaactgtataatcacagtctaaccccaaatcagagattgctagaaccacgaggaacattagccaactccgttttactcttgagaaaaatgaaacttagggaagaaaagtaaatttttcaagagaagttagtggtaggagaactagggttcaggtcttttgatttcttggaaagttttttattagtgtagttaattatctgactattgtaccttttctgccatagactgctgatttcataaaattatgaatgtggcttagttatactaacacatacgggctgtagattatgaaaacatctcagctacatttggggtatgtggttttattataataatttttaaagatttagtcactaaaatggggtatcgttaaaagttgaacctctttttgtcttatgtagttggatggtagaataatgagtagtcattcaagatataaacattatatataatagtatttaacatattctgccacatagcctggcattataaggaataactttactcaaaattcatagctcaatgcacaggcatacacttccatattcaatagattttaggcaaatatttcctctatattgagacaagtacatggaatttgttttcttgagacctgacatctgataagtagcacttaggaaatgccttttggagacatgaagtttgtagtattgcctccaggaatacaatttaagacagcgtaataaaccagcctatatgattttcaatcacagttcaatgttacttttaatccaattttacgttaaaaaattataatttgaagaaatatgaatataaattgtaataatttcccacacaatcattacataataaaaactccatttgttttccattaaacatactttagcaattaattgacctaatagtagttttagtactatattatgattcctcctgttttatgtgatctgcccatggcttctttgcaatacattggtatttatgtaataaatacatgagacattagtcaatttgatactttttaacccaacactgagagtattcccatatgtacccattgcttccacagattattgctgccataaaatggtcagttgccgtgttaagaaagattgccattatttgataaagaaagttattttgacgtgcatcccttttaagggacatgtttagggagctgtaacagttaactgtaggtcatcttctagttcatttgcattgcatggagtggttctcaaacttgagtctgcatagtagccacctgaggagctaattaaaatgcatattcctaaacattttgctcagaaaatctcatccataagctgtgataaggacctaaaaatctacatctttactaagcctttgatacaatctgcagaccatagaggggatcaacatacactgggatctacttgaggtgggagggtgggaggaagtagatgagcagtaaataagactattggatactgggcttaatacctgggtgatgaaataattggtaagcaaacccctgtgacacacatttacctatgtaacaaaccttcatatgtactcctgagcctaaaataaatgtttaaagaaaatagacagtgatatgtgtgtgaatcccaacattctggttttccacaatgctccctgaaatgtgaaaagggagagcttcttgggaatacactatataaatatgctcattcccttggaatgggactactttttgatgaagtttgtacatgtcatcgaaatattactgatttgattattccaattggtagaaaagcatttgaagccttatttttaattccctagaaattatgagaccaccacctaggcaattgacgtgatgtcttccaacttgtataattctataataaaagaatactggttttgatttgcatggttctttatgaaataaagtccaacatgcattacagcatgtatctcttcacttgctcatagggatacaatgaagataaaatggaggcatagacaagaaagcatttgaggggaaaaaggttgagtttgatatgtaagtcatgtagttcagtgtgtctggagggctttttgtggttctctatctgcttttttttttttttttttttttgagatggagtctcactgtgtcacccaggctggagtgcagtggcacaatctcagctcactgcaagctctgcctcctgggttcacaccgttctcctgcctcagcctcccaagtagcagctgggactacaggtgcctaccatgacaccccactaattttttgtaattttagtagagatggggtttcaccatgttggccagggtggtctcgatctcctgaccttgtgatcctcccacttcggcctcccaaagtgctgagattacagacataagtcaccgcgcccggcccactatctccttttaattttattttcaaacagttacacgctcctattgtgggctagaaataaataaaaggacttaacatcatgtaagttgttttccagaacactaagcttgagtttttcttaagcttatgtttcagttttctctcattgcctttccaaaaattatgctgtcatgggattgatccaaatctttgctggctgtttttgagctcacaggaaggtagaaatggagctactcaggaaaagagaaattaaaaggaggtaaacagagacaacagcgaaatagtatcatataagagcaactgattttcttttatccatgttaaattgaccttgattaaaattacataaggagaattccaagaatatgagctgtaaggttgtgactttgaagaacaaagctcacttgtatgtacattttctataatgattgtgggagaaaaatgagtttcattaatgactactcacatgatatactcaattgtttcaaaaattcttttaaataattagtataaagaatgagcaaagttctcataatggttaaaacctattgtgaggcagggtgtggaaatcgtgattgagatgacaaggcacccagttgtactcatataaagaacactgcttgcgcgtatgattgctgttcaggtcagagctttgaggcatttttgaccttttgaagcagttgcatggcaagagatcaaaacgtgaaaaaataatcagctaggaggactgctctcttgcatttcaaactcagatttgacttgaataatacctggacacaagctgagggtatttaagttgattagaaggtagcctaagaagatagaaaatactttttttctaaatgttggagagataataactcttgctatctggaggcttacaatgagaaaagagggcaaatataccctggattgacttctttaaaaactcaaatgatcatgattccctgtaattttttataaacatacttgtaatttgtgcagttttttctaattgccttggccctgatcgatatatattttatcttgatcataattatgaaatacgatagtgacgaattccatcaacatttgcttgtctggaaaagattttattcttccttcacttatgaagcttactttgtctggatatgaaattctgccttggaaattcttttctttcacggtgttgaatattagcccccaatctctactggcttatagggtttctgctgagagatctgctgttaccctgatgggcttccctttgtaggtaacctggcctttctctctggctgtccttaacattttttctttcatttaaacctggagaattgtatgattacgtatgttggggttggtctgctcagtatcttgcattccctgaatttgaatgttgggctggcttctgctcagtgagtatcttgtatttcctgaatttgaatgtttggctggctttctagattggagaagttctcctggatgatatcctgaagtgtgatttccaacttggttccgttctccccgtctctttcaggttccccaaacagtctttgcttcagaatttacataatcccacatttgtcagacgttttgtacattcatttttattcttttctttttctctaatcttttctgcctgtcttatttcagcaagatagtcttcaagctctgagattctttcctctgcttggtctattcaggtattgacaatgtgatttcattgtggagttgtcgtattgcgtttctcagctctatcaggtcattcatgttcctctgtaaactggttattctggttatccgctcctgttacgttttatcgtggttgttagcttgtttgcattgggttagaacattctcctctagctcagggaagtttgttattatccacctttgaagcctacttctctcaattcatccatattagcctcagcacaccatctcacgccagacagaatggtgatttttaaaaagtcaagatacaacagacgctggcatggtttcagagaaatgggaatgcttttacactgttggtgggaatgtaaattagtttatccattgtggaagacagtgtggtggttcctcaaagaactagaaccagaaatacccagcaaggccgttactggatatatacccaaaggaatataaatcatcctattataaagatacatgcatttgtatgttaattgcagcactattcacaatagcaaagacatagaatcaacccaaatgcccatcaatgatagactggataaagaaaatgtgatacatatacaccatggaatagtatgcagccataaaaaggaatgagagtatgtcctttgcagagacatggatgtagctggaagctgttattctcagcaaactaatgcgggaacagaaaaccaaacactgcatgttctcacttataagtaggagctgaacaatgggaacacatgggcacagggaagagaacaacacacactggggcctgttgctgggagaggaggagagcatcaggaaaaatagctaacggatgctgggctcaatatctacctaatgggtctgtaggtgcaccataccaccgtggcacacatttacctccataacaaacctacacatccaatacgtgtaccctggaacttaaaaaaataaatgtgatagtaagaaatttattataattaatattttaaaatataatgtatgtgatttgaagcattactttcctcatttgactgaaatcacatgtgctgttgaaagggtatattagtcatatgctttacaatttggtatgctaattgtaattatcatattacgccataaattgtaattactgtatttaatatgtaatttatattaagtagtatataccaggtgctttggtgtaagcatatatatatatattttttttttcaagcgagtctaaaggttttgtagttttgtggatttttagtagaataaattgtcttctttctcaggaataaggaaagttgtatgacttattaaggttcaaatatctcattcccattttgtgaatattttgctatattgctaacaacaatttttgcaacattctcaactgtgagcacctctttaagataaaatacatatgctcagaatttgcctcttcttgtacatggcagttcatgtttatgctgtatatgtttgtgcctacattcaaggatgcccaaaaagagaaaatgattattatataattatgtgtaccttctatatcatctatatcctgatgagagatttattatgtgtgctgccgaagcaagcacctgatgggagatttaaaactcctatcaaatagtaatataaaacatagctgtaaatgataagccagtgctttttattatacccaaaatgcaaatagaaatatgccaatgtaccaagatgaaaatttctttacatgttcttcttttctgagttaattctcattctttaaagatcctctattttaacccttcataaaatattttatgttcacgttctggctgtacccattctcagagcatcattttgtagacctctttgtacaagggggatatagttgcaaatggtttgcctctcttcttttttggccagtaagtttaattaaaaatactctaaggctttttatttaaaagaccttttcattgcttcctgaaagctctccacgactagtaagcctgatgccaattaaaaaagaaaataattttttaaaatctggaattaaaataaaaataccttacttattttgtgtttccttcttacttaaggtcatagaattaactcccttaaatttgagaacatgttttgggtaattcctcaggttaaagttttattagaaaaatttgaagttgaccgagtgtggtggctcacacttgtaatcccagtactttgggaggacaaggcaggcaaatcatctgaggtcaggagtttgaaaccagcctggtcaacatggtgaaaccccatctttactaaaaatacaaaaaaagtagccaggcatggtggcaggcgcttgtaattgcagctacttgggaggctgaggcaggagaattgcttgaacccgggaggtggaggttgcagtgagccgagatcatgccactgcactccagccgggatgacagagcgagacttcgtctcaaaaaaaaaaaaaaaaaaaaaaaaaaaaaagaaaatttgaagttacatctcaaataactttggaaattaactgtatcattttgctatctccaactataataggtatttgagaatgggccttgtatatcagtgcaataggttttaccttgtaaatgcattgtctgtaacaatataaaatgtaagcactaaaaaatttaatacattcagtctgagttaactcttggaatctctcattctttatttataaatttaaaggaaaggtaagctaggcagatttctatagtggccatcgagttctaaatgtctttgatatgtttctctttgcttttatgtgaaactctggagtacttagtgaagaagattcctacttttgccactggaaaggcagctaaaaaataatgataataacatcctatccctattcaaaggagacttaattatgaaattattacactgtattcactgagtatgtcattaaaataccatacagacaaaatgctcagcatctgtatgatacgcctattatctcctgacaaaaaaatgaaataacacataaagacaaatacaagtctttttcctaagcctatacttgataatatccatccctaattatagaatgtgtttcattacttcagtgttagatggtatgtagaggaaggccagatggatcagaaaaattaaatctcattgctttgcaatttttgcaggtgcagttaattcacacagttgctcaaattccgtatttaatatgaatccagaagacaacatacatctcttctttctgatacaatttgtactaaagacaatttaaaatgaggaacaaaatacattaaattggacagacagttttacagaataaaccttcttaattatcatataatatttatttcgaagaaacaaatgacttatgatgccttctaagtatttgacaataattttgctcatgatttcaatgtcagtacttattcaagaaattttattaccttacagtaataaattaattattaatataaattaaattattattaaattattgtaataataaattaattacagtaattaatagtaaattttagttaccaggctactgtcctgaactttggcactcattgtatgctacattcagctatgggaagtcctctatacttcataagataaagcattttacatccttgtgattagtaactcagcttcctttgtgaccatctgatcttttgcccaaggattctcccaaagttcaacatataaatattttcttttgcttagagatgcaaatctttaccagatttttgtgccttgtgctaccatgcctgtggagttggtttttaagcatggctatcaattattatctaaagctgttgctatgattatgcagtatgttttaaactgcagaagtgcaattcctccatgcccattaaaacttattgatcactccaaagggttacatatacatagacagacaacgcaatgaaaagccttgatccacagttgtcaacctgattgtgtgtgtgtagtgtattttgactaattttgcacagatttcaatatagcatgtcaagagccaaacatatttaacattgagtaattcttcctatataatagttatgatgtgccattgtttacaatttcagtattctgaatttatatatgtgtgtgtatgcatacaaatacacaccccttaaaaggaaaccaccattcaaaaaagtgtacaagtgtaggagcaagtgagcatagctgataagagttggatgaatgaacattcagacttggatttatatctatgctttgctactaaaaagttttatctgcctcaacaaggtcactttcatctataaaataggaataatattagtacttactcttagggccattgtgaggtcataatagctaccatttattaaagctttacaacatagcaagggagtttttctagatcttttgaataagataatcaattcaaaacacttattgtaatgcctggatcatgcagaaagcttcataactggtacctgttattgcaagtattagtatttgcaaaataaagattttatgctaaattagtaactaatactttatagcttgaatctttctagtaagtatctaaatattcaaatactagaatatctcaaaaggcaagaagttgaaatctcttatcccagcataacaaaaaagttacaaaggcaataatatgtaaataattaaatggaaagttaaaagtttcaattaagaatatcagtcaaaaataaaaggaaaatttattagcctgttcttacactgctataaagacatacctgaaactgagtgatttatgaagaaaagaagtttgactcgttcgtgtttgtggcattatagtattccttggtgtaaatgtaccacattttctttatcttgtctatcattgatgagcattaaggttgattccatgtctttgctattgtgtatagtgttgcaatgatacacatgcatgtatctttataatagaatgatttatatttgggtatatacccagtaatgggattgctggcttaaatggtttttctgcctctaagtctttgagaaatctccgcattgtcttccacaagggttgaactaatttacactcccaccaagagtgtaaaagtgttcccttttctccacaacctcaccagcatctattgttctttgactttttaatagtaaccattctgactggcgtgagatgttatctcattgtggttttgatgtgcatttctctcatgatcaatgatgttgagttttctttcatatcgttttaggtcacatgtatgtcttcttttgagaagtgtttgtttatgtgctttgcccactttttaatgaggttatttgtttttttcttgtaaatttgtttaagttccttgtagactctggaccattgtcagatggatagatggcaaaacttttctcccattctgtaggctgtttatttactctgacggtagtttattttgctgtgcagaagttctttagtttaattagatcccctttgtcagtttttgcttttgttgcagttgcttttgccattttcctcatgaaacctttgcccatgcctatgtcctgaatcttattacctaggttttcttctaaggtttttattgtttggggttttgcatttaagtctttaatccatcttgagttaatttttgtatagattgtaaggaagaagtccactttcaattttctgcataggactatcccagcactatgtattaaataggcagtcctttccccattgcttgttttttcaggtttgtcgaagatcagatggttgtaggtgcgtggtcttatttctgagttctctattctgtttcattggtctatgtgtctgttcttgtaccagtaccctgcttttctggtgactgtaaccttgtagtatagtttgaagtcttagcttttgggctgagacaatgggggttttctggatataggttcatgtcatctgaatacaaaaataatttgacttcctctcttcctatgtgaataccctttatttctttctcttccctgattgccctggtcagaacttccaatactatgttgaaaaggagtggtgagagatggcatccttatcttgggccagttttcagggggaatgcttctagcttttgcccatttggatgtgggtttataatttatggctcttattattttgaggtatgttccttcgatacctagtttattgagaatttttaacatgaagggatgttgaattttattaaataccttttggttgtctattgagatagtcatgtggtttttgtctttagttctgtttatgtgatgaatcacatgtattgatttgcatgtgttaaactaaccttgcatgctagggatgaagcaaacttgattgtggtggataagctttttgatatgctactggatttggtttgctggtattgagaattgttgcatcagtgttcatcaatgatattagcctgaagtttgcttttctttctttctctctttctttctctctctctctctctctttctttctctctccctctctctctctttctttctttctttctttctttctttctttctttctttctttctttctttctttctttcttctttccttctctctctctctctctctctctctctctctctctctctccctccccctccctccctccctccctccctcccaggttttggcatcagggtgatgctgacctcataatataagtttgggagaaatcccttcttttcaatttttttggaatagtttcagtggaaatgataccagctcttctttgtaccgctagtagaattcagctatgattccatctggacctgggcttttgttggttggtgggatatttattattgcctcaatttcagaacgcattattgatctattcagcaattcatttcctttatggttcagtcttagaggggagaaatgtgttcaataatttatccatttcctctaggttttctagtttatgtgcatagaggtgtttatagtattccctgatggttgtttgtatttctgtagaattattggtgatattcctcttcaaatttttcattgtgtttatttgattcttctctcttttcttccttattagtctaactagaagtctaccttttttatttttatttttttccaaaaaccagctcctggattcatttagttttttggagggtttttcatgtctttatctccttcagttcagctctgatcttggttatttcttgtttgtttgctcttggtttgctagtttttttatttgagatgttaggctgttaagatctttctagctatttgatgtgagcatttagtgctataaatttccctcttaacactgctttagctgcgtcccagagattctgataaattgtctctttgttctcattagtttcaaagaactgcagaggtggcagctggtcttcctcccagaagctctgtcccagggagagatcagagctctatccattgaatcctgggtggaatggctgaagccccctcagggaggtcccacccagtgaggaggatggatcagggtcccacttaaagaagcagactggccacgatctggcaagggttgccacacactttcaaacaaacaaatctcatgagaactcttatcaggagagcagcaagggggaggtccacacccatgattcagtcccctcccaccaggcccttcctccaacactgaagacagaattcaacatgaggatttgggtggggacagagagccaaaccatatcataaaataacagcataaacaaaatgaatttaaaattaaagaatagctgaatagttcgtaattgcaactacagtcatatgctgcataacaacatttcagtcaacaatgaaccacatatatgacagtggtctcataatattattatactatattattttttacttttatttttgcttcagaggtacatgtggtggtttgtcatatagataaattgcatgtcacaggggtttgttgtacagattatttcatcacccaggtaataagcatagtacccaataagtagtttttttaatcctcaccctcctcttaccctccagcctcacatagaccaccgtgtctgttgtccccttctttgagtccgtgtgttctcaatgtttatctcccacttagaagtgagaaaatgtgatattttgtgttattgtgttagtttgcttaggataatggcctccagctccatccatgtttgctgcaaagaacacaatctcttttttcatggctgcatagaattccacagtgtatatgtaccacattttccttatccagtctaccactgatgggcatttaggctgattccatgtgtttgctattgtgaataatgcttcaataaaacatacatgtgcatgtgtctttagggttgagggatttatattcttcttggtatacccaataattgttattgctgggtcgaatggtaattctggttttcgttgtttgggaaatcaccaaactgctttccacggtggctgaactaatttacactaatatcagcagtgcaataaacgttcccttttctgtgcaaccttgccagcatctgtgattttttgacttcttaataatagccattctcactggtgtcaaatggtatcttattgtggttttgatctgcacttctctaatgattattgatgttcagcattttttcatatgaatgttttctgtatgtatgtctttttctggaaagggttcatgtcctttgcccactttttaatggtgatgtttggtttttgcttgtaaatttaagttccttgtagattccagatattagacccttgtcagatggaaagtttgcaaaatttttctcccattctgcaggttgtctgtttactctgttgatagtttcttttgttgtgtagaagttctttagtttaattaggtcccagttttcaatttttgtttttgtttcaattgtttttggtgtctttgttatgaagtctttgcagtttcaatgtccagagtggcattacctgggttatcttcttaggtttttatagttgttggttttagatttaagtctttaatccacctcgggttaatttttgtatatggtgtaaggaaggggtccaatgaataggcagtccttttcccattgcttgtttttgttgatttcattgaagaacagatggttgtaggtgtgcagccttatttctcgactctctattcttttccattggtttatgtgtctgttttttgtaccatgctgttttggttactatatccttgtagtatagtttgcagtcaggcaatgggatggttccagcttttttctttttgcttaggattaccttggctattctggctcttttagtggctccaactgaatttttaaatagtctttttcttattcagtgaagaatgttattggtagttttttgggaatagcattgaattaaaaagtgctttaggcattatggccattctgtcaatattgattcttccatgagcatagaatatttttccattttttgtgtgttatctctgagttacttgagcaatattttgtaattctcagtttagcagtgtttcacctccttgcttagctgtattcctaggtatcttatttctttttgacaattatgaatgggactgtgttcttcatttggccttagcttaaatgttgttggtgtgtaggaacactagtgatatttatacattgattttggatgctgaaactttgctgaggttgtgtatcagatcaatgagcttttgggcagagactatggccaaagtatagaacctcatcgtctgcaaacagggataatttgacttcctctcttcctatttggattgcctttatttctctttcctgattgctttggctaggatttctagtactatgttcaatgagatttgtaagagagggcccccttgtcttatgccagttttcaagcacaatgcttctggcttttgcacattcagtataatgttggctgtggactttttaaagatggttctaattactttgaaatatgttccttcagtgcctagtttgtcgaggatttttaacatgaaagggtgttgaattttataggatgccttttctatatctactgaaatgatcatgtggtttttgattttttgttctgtttatgtggtgaatcacatttattgacttgtgtatgttgaatcaacctcgcaaccctgggatagaagctccttgatcatggtggattagctttttgatgtgctgctggattgggtttgctggtattctgttgactatttttgcatctatgttcattagggacattggcctgaagttttcttttttggttgttgtgtgtctgccaggttttggtatcaggacaatgcttccctcatagaatgagttaggaaggagccgctcctcaatttttgggagtggtttcataggaatgataccagcttttccttctatatctgttagtattcaggtgtgaatctgtctggtcctgggctttttctggttggtgggctttttgttcctaatttaatttcggaactcattattggtctgttcaatgattccatttcttcctggttcaaacttggaaagttgtaagtttctagcaatttatccattgcttctaggttttctagcttgtgtgcataggggtgttcattatgaatagtctctaagggttttctctatttctgtggggtcaatggtaacatcccctttgtcattttttattgtgtttatttgagtcttctctctttttttctttattattctaggtagtggtctatctttattattaattatttcaaagaaacagctcctagattcattgaccttttctgtgcttttttgcatctcattttccttcagttcagctccgattttggttatttcctgtcttctagctttggggttagtttgctattgtttctcgttccttgtgatgttcgttttgtaattagagatccttctaactttttgatatgggtgtttcgtgccataagcttgcctcttaacgctgctttgtgtgtgtcccagagattctggtatgttacatctttttaaattttcattagtttcaaataatttcttgatttctgccttaattttattgtttacccagaggtcattcaggagcagtttgtttgatttccattttaatgtatggttttgagcaatttgcttaacattgatttctatttttattgcactgtggtccaagagtgttgttggtataattttgtgggttttaaaaaaattttctaaagattgttttatgcccaactctctatatcatatttttattgtacctttcgatatgtttggatacacaaatacttaccattgtgcctacactattcagtatagtcacatgctgtacaggtttgtagctaggagcaataagctgtaccacataggttggccgtatagtagtctgtaccatctaggtttgtgtaagtacactccacggcgttcgtacaaggacaaaattgtctaaggatgaatttctcagaatgtgtcccagttgttaagttatacatgacttgtagtgattcctaataaactggagacagtggtagaaaaaaagtattttattttattgtatgtccttttgtattctttaaatttgctttgatgtacttatgtttctttttttaaatgtgcattttttaaacaagtggaagagaagatggaaagaaagaacttcatttcttgagcatagtttgtttttcccaggcctatcaaaataacacaatcttactgcaagaagaggcacaccctggaataatatcaggatgctggcaaatgctcttccaatttttctcagaatgagaaaatgtaaattttaaagtttaaatctttttaacatatgtaatcttatgagtaagaaggttgagtatagaaaaattcttcaaatttccctgagcgtttagaaaagatagtggttactgctgatatttaccattatagagcacttattttattcagatattatatcatttaattctcaaaaccaggactggctacataatttgtgggcccagtgcaaactgaaaacaagggcttcctgttcaagacctaagaatttcaagacagtggaagcagagcttgaaaacaagcatggaagcctcctgagcaggggccctgggcaactgcataaattaccagcccatgaagctgtccttgcttgtaacacacctgtgaagaaatgtgttactcttactttaaagatgaagaaaataatgcatagatttgagataagaaccaaccagccccaaatgtcacagtgtataaactatggatctggtgtttaataattgtggagactggctccaatgcctctacttataaccactctaagaggaatcagctcccaaatgtaaagacaagtatttctaaactatttcccatttttactagggaaattaacttgcagttaaaatgaatagtattttaaaaagaaatgtattttcttttcatgatatcattttagagtcttaaatagactcataatcaaaatgaagaaaggtgactgggtaaaagtatagttagctagatacaaagattgttgaatataggtcaaactatattctattctagttttgactctgccatattaaacattttagtgaaggcactacgttattcttatcatgcttgaagttttcctcattctaatgcattgagtgacaggagtatgattccatagatcttaatatataaatagaaatgatagatttaaaacaaacagtttggcaaaactttcaaaatttttctttgcttacaaatgcaacattttgcagataatatcttatagaagaactttggaaactaaaggaatacagaaatatacactgtgcaacagaaattttctctactttctctgtcaaaaatcaaccaatgtttatgtctagcattgtttactcaatagtgtaaagcaaacgttttccaatgacattaaaatatttgaaatataatactccatccacattcatataccataatgtacttaaaccatcatctatgacatgaggttgtttccaaaagttactgttagaaagaccctataaacaaggataaatattatatctagccttcagcatcaaattaaatctaaatgttaaaatgctagctgagagaaatctgttttcataacatttaaagagaaaattacttgattactgtatgtttggtgtatgtaattattttgcatactggtatttttcacgtggcattcatcttcacaattatttgtgtgattatcatcgtccctattttgccgtaaggttcctaaatatggagtttctattttactcatttctgaatgtcctatagtgaatatatattcaataaacattagaattttatagaaaccttgtggttcagctgctgaataacttacacagttttagaattctttgattgactatggtgtccaaagccaagaaacattggttttggatgacgaatcaagttatatctacttctagcaaataactggcattatagagtttgaaaatgatatttatcagggtcatgattattagatttcaaatcttagaatatcaggtagaaatgatattcaatttactctgctttcattcagaactcaaaacaagttttaacaagaggaagtcttaatcaggcaggattcctctggttgttaagaacatctttcccaatggggaaagtttgcttgcatgctaagaaaggagctttctgtttcagggagtagtgagctctgtaataatcaggaggtcatgttaaatggccttcgtagtccctctcctgtctatatttcctaatgattctaacacataattaagtgtcaataatagttatagtcaataactataagccataaggaaatttagtacatgactgattgttttttattctgattgtatgaagtaggttttgagagtgattattaatttgttatatgtaatgagttctaccctatatttacagggtgaatgcacagttttcttatttctccatcccgaaggaaatgaagtagtatttttcaattacagtgtagtagtgattattatatagaacaattacagactcatgtcttactactcttttattaaaaatgattcatttttctttcttaaaaggttgagtatatttttaaatgccgcttcacagtatatcatgttgtcatttccctttaccctccatgggcacatgtatccaattttataagtagataccacgaaaatattaatattacagaaattaatttaagagtcaaatttttagtagcacaaatgttctatgagattggatataactgcatgaattagcttggtattttcagaatctctgcattctggtctgtatgtttaaaattaggtattttcttaatctgcaaaatattatcttctagcctccactgtatgcaaagaaagtgtgctcatggttaaaaaaatattcaaataaaaaaataaattatcttgggatcctactaaaaactgcattttctttgcaaagcaagttttctcatggttaaaaaatattcaaattacaaagtaaatgctcttggaatcctactaaaaactacattttctttttgactagaaataaaactaattttatcacgtaatggtcattttgtgttgggtgcaatgtttgagtttatattttaagctttttttagagctatgttgctttctgctttcatcttgacataacttgtcaacagacttataattaaagttgtttgaggttcagtgattcattctaaataatgaatctatggagatcctagagaagataaaacctgtgcttggcaaatgtagaaactgtaattcttagtatccttttagcctaccaaaatggaaatccttcagtccctcacataggtaaagatatgtctttaacaaaaggtagcctttttaagctatgtatgtcaaagcaatttttacttaagacatcatggaaaagattttattccttcactgttcattgccaatttggaagctgaaataagaagatcctgaggcttttcccatttcctcacatgaaaggaatcagtcctcgtgtatgaggcagggagattactacaaacccttcccttacctcttggcaaattcaggaaaattgctaaaatgaatcttgacccagccagatccctgctcctttgcttgtaaccagaggcagtttcaatgcaggcctcttgtgacttccttggaaacagaccttgcatataagttggattgccagaaggataatgattaccatcccaagaggtaacgttacaatcgtcatgagaggagctctgtgagacggagaatatgataaggaatgattgtctcaccattatatgacttgtctatctcgtaatgcccatgtattgaggtgatggcctctcatgtcttggctcacaaaatgtattattccaaagatggatgaactgttgcccccggcccgctgccaaaagtatgaacaggaggtaattgagattctaaaccaagaagtgtctccagtgatgaatatgggaactcaaatatttgaacataatcactaatttaaatcaaacaagagtagtgtgttttttagcatttgaataacattcaacataaagatatatatggactaatacatactttatgttaaccttttattgtaattttaaaagctgtttcacttatttgattaaagagtcgttcattaccaagttgaaataattttatttaaaaatgtataacataaaataatcaatgtgtatgataaccaaaaatgcattctacaaactattaataagcatttaaaatgttctaggcaatggaattggtactgatgtacgttagtaacattcatattaatgtaaacattttaaacagcatgtagaattaactatcagaatgaattatactctacatttttctcctctgcccccaccccttatttcctacagtttgaccaatatattgaaggggcgctaaattgactttcgatgttgagattactttcccttgctatttcagtgaaccaaacttaagtcagataaaacaattttatttggcttcaatatggtgctattttgatctgaaggtcaatctaccaacaagcaagaacagtttctcattattttcctttgccactccaagcagtctttactgaagtctttctagcaatgtctgacctctgtttcaatacttctcacagatttcacaggctgtcaccaccactcagccatcactaacacagacaactgtaatggaaacagtaactacggtgaccacaagggaacagatcctggtaaagcatgctcaagaggaacttccaccaccacctccccaaaagaagaggcagattactgtggattctgaaattaggaaaaggtgagagcatcttaagcttttatctgcaaatgaagtggagaaaactcatttacagcagttttgttggtggtgttttcacttcagcaatatttccagaatcctcgggtacctgtaatgtcagttaatgtagtgagaaaaattatgaagtacattttaaaactttcacaagaaatcactatcgcaacagaaagtaaatgcttaatggaaatggtgttttctggggtgaaagaagaaactatagaaactataggtgataaactactgtggtagcattttaatcctaaaagtttctttctttcttttttttttttcttccttataaagggcctgcttgttgagtccctagttttgcattaaatgtcttttttttccagtaacggaaagtgcattttcatgaagaagtacacctataatagatgggatccatcctggtagtttacgagaacatgatgtctcagtctgcgcatcctaaatcaggagtaattacagaacacatttcctgttctttgatatttataaagtcttatcttgaaggtgttagaatttttaactgatctttttgtgactattcagaattatgcattttagataagttaggtattatgtaaatcagtggatatattaaaatgatggcaataaaattttatgagtgcaaagctggcataaaaattattttaaaaggtacaatttccctttcattccagttattgtaattctaagattaagaaagaacgttaaaatctgccgtatgtttttaagcagcatatgtttagaaactcatggaacacttgacattagaatttgtgtataccagggtagagaagtttgaaaagaacacacatctaaaaataccatgtcagatgttctaagaaaaaaaataaatctagagaagttattcaaatatattatttgggatgtttagtacttctctattaactaatgacttatgacctactttgataattccaaagtaaatcactgggccttttctccctggttgtgtcagcttggctaagcaaatccactagtccaggggtcaccaaactaagacctgctaaccaaatttagcatgctgccagtttggtatggctcatcagccaagaagtgtttttacgttttcaaatggttgaaaataatcaaaagaaaaataatattttatgacatgtcaaaattacataaaattcaaatttcagtgttataaataatgttttagtggaacacagccaaactcatttatttatcacttatgattactttcgcattacaacggcagagtttgaatagttgtaacacaaactgtatagtccacaaagcctaaaatatttattacctatcctatcacagaaaaagtttggcgacccttgctccagtcaaatggctctcaaactctatgaatattagcattctttttgtggcaacaactttcaggaacttccaagcactctactcacgatggtaatagaaaatctaacaaaaattgatggagtgaaaagcataatggcacaaatccgtgaagcttttgatgaatttcttttattattcctagtaagatgtacattaacttgtttgttgtcacattaaacatgtgtttatagacaacgcttagtggacatacagatttatggatactttgcaacattccaacaaccctccaacagttctccaaacagagtaatagggacacctagttgcctaacacttttaatgtcttcaggacttgcctaatacagaaattaacagagcaagctgattcatgtcaatctctgtcttcaaaagcttattattggctcctgtttggagaatggattgtgttggaaaaaaaaaaaaagtgtgttctgacttctttttgttttcaggaaagagtggctagtggtgaaataccttctctccaaaatttgtttgtatcataagttttcggcaatttttgtatgtgcctaaatgagaagtcccattgggcacatacagaaagattcttcaaataaaagctaacataaattgaggatttattatgtgctcagtagtagattcagtgctttattggcatcgcatgtatttttcccagtaacctcccaaaataggtatggctataattactttataaaattatacacagctacagtgtacctcagacaggatttgaactgaggtagctacaaaacctgggctgtatagtaaaatgtctttttcatagatatatgactaaggtaatcctattgatttacctgaagccatcccagttacacctgttgtcccagcataattatatatagcatcaactttcactctcaagtgtgtcctgatttggacggcaaaattatctgaacacgctatatacgacacttgattgataaatttagactgaacgaagatagcaaaaaggcaaacatttaggaacaaattcattaattgataattgtctacagggtggaatcttgttaaagtattgtaatgattaaagaggcatcatgcaaatataaccataagctttatattagctagtgccccgtttttgtatcatctgaagcccactaatatttcactgaatattgaggtcttgaccatctgttgaatagtgttttatttaaatgatgtcctcttccagcttctgtgacacactaccagttgtcacccacgactctttacctgacttgttttattccttctgccttattcctatgggagtatcacacagatccatctctttgcctttctgacttcttttattttgagacagtgtcttgctctgtcacccaggctggagtgcagtggcgggatctcagcttactgcaacctccgcctcctggtttcaagcaattctctgcctcaacctcccgagtagctggaattacaggcaccctccaccacatccggctaattttttttgtattttttagtagagacagggtttcaccatcttggccaggctggtcttgagctcctgacctcgtgatccacccacttcagcctcccaaagtgctgggattacaggcatgagccaccatgcccggccttttgacttctttatctggattatctcctctcattgattcgagcctggctctaagtgactgactcccaaatcatgtagctccagatgtgacactctccctcaaattaaagctttatatctctaaagctatttccgcttgtgcatccagcaactgcctcaatgttcatcaaatgcaaacatttgttccttccaattaaccatacctacttatacattgcacacatattttagttataattcattgcctgtgtgtctagagaagtagcaaatatggaaaaaatcattgcttttggaatcagaattactgaggtttgaatgctgccctttttttttttcccaacttttagtttaggttcaaggggttaacgtgtaggtttgttacatgggtaaattgcgtgttgtggctgtttggtgtacagataattttgtctctcaggtaatcagcataatatctgataggtagttttcccatcctcacctgcctcccaccttccactctcaaataggccccagtgtctattattcccttctttgtgtccatgtgtactcagtgtttatctctcacttataggtaagaacctgtggtatttgtgaaacctgcctgttttaattactagcttatgagcgcaggcaaattacttgttatctgtgcctcagattccagtattctcactttataaaacaactgtcatgaggattaaataagcatttaatacattgcctttaaggtggtaaacattcaataaatgcagtggttcgattcttatttggtggtggagaccatagagatgatgaagatggaggaagattgtggtgggtaggaggagtagaagtgatggtgggagaggtaacgatagtagagatgatgatgatggtggtggaggtagtgatggagatggtagtcatctattatcgacagggaaaaattccataataaacattatctcaaacctaagaaatgtaaaattaccttcctgttttcctcttcaaaacagaatttaccacctgacatctctagttctgtgaatttttcttctactttcttttccttatttattataattagattgtattattgggcaagtgccatcatttccgtcatttcatgttcattcgaattgccaagtccataacctgagccatatacctcactgtggagagaactgccctcctttctaattgatttactaaaatgaatatatctaaaatgatgctttttgatgtctctccagacatgcgaattcccataaatccagatacctccaaaataaaacccaagtgcttcctatggcattcagtattattctcattctccactaattttatgtctaccttcccaataatcattattccacttcagccagtaaattacattacattcgttttgttgtatgccttcatgccactcacataaaatttctcattgcccgtcaaaacaaaggaagcctattattacacttctttatgttttacttagattccattgtagcaaataccgtggatacaataagtaaccaataaatgtttgttgagagagtgaatggtatataattcaaataattgcagtaactaaaatttgacatttcaatatcatttaaaaattctacctagctcttcctggaattgttcttaataataaacgtgaccatcctgatgatctttaataattccaattttacccattagggtatccttatttacccaaaacaattaagggatttaaaattcagctttctaccacatagtttcttaactatctaaggtacatttagtcgattcctaaataattatacagtttctacatatgttgtatttattgcataaatttttctctttacactgagatttgcaaaagtgtctgatgatcttgggtcacaagataattatttctaatagcaaattattcctgcaattcagtgatattattgtacacgtaggtaattatcagagtaaggaactcagcctagggtaaaactagatctattatctagttaattggtatttatccaggagattacttcctaatcatgtagcagttattttaagggatttttaaaaaaagctttaatttatacttttgtagcaaccaggcagaatgaatggcaaattgtttttaagtgaatgccatcttaataaagataatttcccccaagtaaagcgttcataaatgaatatctttgtcctcaaggataatgtagaggcattttgaaatgcctcagttcacctggtctgttttttccctccagggtaagcagacagaatgtaagcttgctttctcggctatttcctgcatcctaactacataggaggataaattgactgatctacatacctgaattattattatatattctacttttcagtttgtttctgttttttgtttgtttgattttctttttatggctgctgtccagatgaagttaaattgtgtcacatctctggaaagaaaatagataacagataagaccgctctgcagttttgtgagactcatgcctaaaacatttttgttttagatattgattataacttcagtttctaaactaaaatctgaaagttgtatggcaaaatataccaagttatttgaaggacctaattagataattaatgtgtccgtgaactttttttttttaatgttctatatgataaattgatcctaaaatatctgggatgttaaactcagtaatgacacttttgcctattggcacagcccatagaaacaaaacattttagatgatttgcttctttttttcctaaggagactagacttatgcatgtttacaggttaattgaggtccagaaaggttaaataacttgctttcagttgcaaaataaggactggtgctgactctcctaaatccattctagtgttatagttgcaatgtcatgttactttttatgtattaaaggaaaatgaccttggtcataaattcaaatttcgctttagacactattttttgttaaaaaaaaaaaaaaaagaaatagaaatcttgcataccatcttcacatcctcaaaaagataaccatctattaaatgttcttgagattatgttgtcttatgcatcaagaataaatcaatagcagtgttttgaagaatatagtaatgtgaattctagagaatgctatgggatcagagaatacttagaacagtaatattcaaactgcagtgcatgaaacagtatcatcacctgggaccttctttgaaatgcagatttggagggcccttcccaaacctgctgaatcagaaacactgctggtgggcccaaaaatattttacaagcactctcggtgatacttatacaccataaaatttgagaaccctcgcactggcatgacaacagtggttctcatgcttcagcatgcgtcggagtcaccagagtttctaattctaataggcgtggagtggtgcccaagaattttaatttctaacaaggtcccacgtgattctgctgctactgatttagggcccacactttggaaatcagttcactggagtgtcttgtcatttacagtctgacccctgattctctttccttatgacagcccccataaaggggctttcacgtatgtccgtgtgaagagaccaccaaacaggctttgtgtgagcaacaaggctgtctatttcacctgggtgcaggcaggctgagtctgaaaagagagtcacggaagggagataggggtggggccgttttataggatttgggtgggtagtggaaaattacagtcaaaggggatttttctcttgtgggcaggggcgggggtcacaaggtgctcagtgggggaggttttgagccaggagaaggaatttcacaaggttaatcgctcggttaaggtggggcaaaaacaaatcacaatggtggaatgtcatcagttaaggcagcaaccgggcattttcacttcttttgtgattcttcagttgcttcaggccatctggacgtaaaggtgcaggtcataggggaaaggatggcttagcttgggctcagaggcctgacaggggccatctattcctgggcaggttaagggatgctactgttgcatcttgtgacaccttactgctttatgatgaaatgatctatccatatgcttgtttcatccactagaattaaagcttccctgggccaggatccatttcttgttcgttacctgtgtgatgtcttctgtgtagtagatgctcaattcaagctgtgaatagaaatgcactatattgagaactggtcctatgagatactatatctttggatgtctggctacagtagctatgtgaaaatgtattcttccagaatgcaaggcgtaaaagaatatcaacacgaaagaagacaggatcacattcccagagctgttacatataattttgttcgttttttgagtgaagaaaatggtactcatacttattcatctaaaaggagaagcatagttgagtgcaaataaaagtcagtttttaatcagaagacctgaactatctgtattcccttacggactcctgattctttcctttaccctctcatactctacatcgagcactgaaactgctctcagcaaggtcgccagagagctccttaattgccagctccaaaggtcactcttcagttcttttccctttttgacctttgtcttgtgcttgacagaaatgattagtcccttcttgaaatttttctctcctgcagtttctgggacattgttctctcctgttttctttcagagtatatcttccctgtcttctattcctgccctttaatgtcagtctacataagactcaaattgtgattttattttcttcttatgatgctttattttttggggaaatatcatttataatctttatcatcacctatatttttgattcacaaattgatatttctacctctccctctctcctgatgttcatccctgtataattcaaatgcttataggctatgtattcctggatttctgactggaatctaaaatatagttttggagtttagatcgtataactctagagagggtcattcacatcatagtctctaagaatggtacatcctgaacttgtgcagtgagcaacctgtgcagccattcacagtggtcttgatatctgccacatcactaaatccctccaaatgtacctgttaaattctctttagtttgttatttttttctacatccttgctgccttcactctagttaaaactgaaatttttctgtatgaaatttttaactgatttctctgcctctgatctcacctctcttatccatgctttttacagcctcccgagggatatcttaaaatgcagttttaattagattattcccctgcccataaatcttgaaatgcatggcgtagaaattcttttgtgatctttagctgcctacctctccagcttcactcccttctcctctgctccttttttaaaaaaaataccagtgctactccaaataatctgcaaactttttagtaccagtccacaattgagataagaagcttgagccagaatataaatcaatgtactccttcctttgtcaagaaagttcggcaattaaaagcaaaataagatcaaatcgtttgttcagtgactcagttgatttatactctggtgaaaactcttttcttcttacagactaatagcaaacagttcactgtctgctaaagtctgaactttgttccgcactgccctatgctttagcttaaattaaccactctttgatctccaaatgctctgtgctttcttaagcttctgtttctttgtacctactgttttctctgcctaagattctctttagatacctttctttttcccattcccatgttacctgccaccgtgctactaaccaccttgtctttctggttatctaaccttgcagaggcagttctcagccatttgtgtgttttttttttttttttttttttttggagacggagtctcactctgttgccagtctggagtgcagtggcgcgatctcagcttactgcatcctctgccccgtgggttcaagcgattgtcctgcctcagcctcccaagtagctggcactacaggcaagggccaccatgcccagctaatttttgtatttttagtagagatggggtttcaccgtgttggctaggatgggcttgatctgttgacctcatgatccgactgctaaggcctcccaaagtactgggattagaggcatgagccacagtgccaggccacttctcagcctttttaacacttctattaaaacacttgccaaattgtatggtaatgactttatttttgcatgcctgtatctccagtaaacgccttgagggaagaaatcatttcttgtcatctgtacacctataatgcataaagcagaagtcagctcatagtaggtattgaataaatatttattggatgttgatgagggattttccaggttttgtgcgagtcttgtcagaaaaacaaaatcactgtgatttaaagagaggaaacgtaatataaggaattggctaagcaggtagtagaaaactgagacgcagcgcaggggatggagaggcaactcaaagcactagtaacgtaaggaagctgctaatatccctagagctggagaaacaatacagaaaaagtgatattaccagagctcagaagctggggctttctaacagagattaaactaaagttaggactgccaggcagaaaattggattgttgaagagggagctagctatccagagaaaacagaagccacagcagagatacatctgctctagaaatgccacccaaggtagttggagaagaaaaaagaccttggcttttctcttcctcccaccttccaatattctgccattgcctccaaatgaacaattaggagggcaagtggtgttgggaaatgtatatccctctaatacagaaagtacagaagaaatgtggggaatagatctgagagcagatgggcatattactgcacagatgggttctggccgtgcatcttctgctcataaactatgtgacttaagccacttaatctccccaagaatctatttcgtcacccctgaaatggaatgtatatggccttccctgtttgccctcacactgtggaaattatattacatgtgtttgtcttgaagaacgtttacatttaaaaaacaatgtctcctttccccaggagaaagttgagtttccaattattaattcagggatggtatcttcccatgaccacatttatatattattcttattctgacatcttctgagagtattcttagtaaagtcttccctggtcagaaacctgtctctttacaaatgaacacatattatgctaccacagagatataaaaatgatgccaggctgggatggcctgaattgtgtcctccctaaattcttatattgaagctctaatctccaatgtgatggaatttggaaatggagactttggaagataatttgatttagatgaggtcatgaagatagggctcttctgaggagattagggcccttataagaagacacaacaaagagcttgctggctctttctccctgccttgggaggacacagcaagaaggaggttgtcttaggctgttcttgcactgttataaagaaatacctgcaactgagtgacttacatgaaaattgatttaactggctcacggttctgcaagctgtagaggaagcatggtggcgtctgcttctggggaggtctcaggaagctttcaatcatgatggaaggcaaaggggaaacagtcacatcacatggaagaatgggacaaggagagtgagacagtgcagggggaggtggcacacatttgtaagtgagttctctcaggagaactcactatcgcaaagacagcactaagccgtgagggatccgctcccatgatccaaacacctgccaccaggccccatttccagcactggagtttacaattcagcataagatttgggaagggacgaatatccaaactataccagaggctgtctacaagccaggaagaaggctgtcaccaggaactgatcctgctggtaccttaattttggaattgtagcctatagaactgcgagaaataagtggctgttggttaagccacccagtctatggtattttgttatgtaagtgctagctgactaaaaaccggctttgttaagcaatgagtattacttctgttttgactaaagttcatagtgatgcttactaacacagtagatggattgaaacaggtcatgatgctggcagtggggcattaagtacacgtcagattgaaatggctttccacattgcactagatccttttggaacccgggttggaagttatttaaacttgaaagacccacaagcatgttgacttctcttaaactcaaggacctttcacactgagagagtttaaagtttaaattgcctcccacagggtccaagtcatcatccaatgcatggtgggtttctttgaacacttctgtagtcattatgagtccacatcatttcaagaaagaagagacagcaacattagttttcatgctaattttcctattcactcaactaatatctaatggattgctatggtatgtaaaacactccagttactttaactgtaaatctaagctttccctcaggaagcttgcacccagcataaactgtcatgaagaagtactaataaaatgttagaaaagttttaaggaagaaaagttcacttcctgcttgagaggcatggaagacttatgggaaaattagcatctgactggataattaaagagtagggaagcattgggctcaagatgaggaaagtgacaattcattgcaggggaaagcctgtatgcgaacaaaacttacatgggattaagtattcttgtttgcctccagcagaagtatgaagtaaaggaagtttagaagtaaggaatgaggttgaaaaggtaggttgagttcataataactaaaggtattcaataaaagattaaggcatgtagacttaaaccttctggtcatggggagccattgcatatttttgagagagagaaatatgatatggctactgtgaaccatatcattttgatctcacttgagagttgggagagagaggccatcttaccttggtttcatagactgggaagggggaaagaaaagttttctctaaagggccagagagtaaatattttaggttttgtgtatcataaaatttattttaaaactactcaactctgctgctatagctagaaagcagccataaacaatgtataaatgaatgagcatgactgagttccagtaaaattttatttaccaaattagatggcagaccatatttgtcccatagaacatactttggggattccggcactaatgggtaaaatgagactattttgctgttgatttttgtttatatgtttcattgtctttgttatagctgtgtttgcagtttttattcttgttattccaattgtggcttttactttatcagtcattaagaagacactaaaacaaatatgactactctcacacgtgagaaagtgagaaatggcatagggcttaaagccagttaaaaaaggatcatggaagatattaataacaatagctaatatgtatatggcttctaccaagtatttgctacatattaatgtatttcacacttaaaatagcattacgaagtaagttttattattgtcactctttgccaatgataacaatgtgtcatagaaatttcaagtgacttgctcatggtcacatagtttacaggaagcatcgcagctaggatttgaacccagacagcctagcttagggtgttgccttcggaaattcctcgccttgctatgttgtaataagttaaaggtgatttcatcaaattatttagctgaaataaaatgcttgactgggactccttaagaatttgccaaagtctatggaagctgcacttattctagattatgtctgttctacattctgaagtatcattgactctagtgtcccatggcaacacttgattatctttaaatacagagacctttttcactgaaaagatttctttaaaatttagatgtctttttcagcatcaaaaataagtggaatttccatataattgaacttttttttccaagtgcaagacttttggagctcaccatggtcttaaccacattatataataagtagtaacttttttcatctatgcttaatattttctctgatgtgagaaattgtatcatcagattagaaagttgaggattttaggaaattaagggaaattccaaggtaataataaattgggaaataaattattttatattgccattagggtacaaagtatacaactaaggatcatattttaatgaaaaatttcagaattaatatcctgatattagagacttcaatcaaattctcatataatccaagatagcgtagtcaaaaccactaaattactgtactgtgtagcaatgaacagtaattctatattgacttatccttattttttttttaagatgggtttctcgtttatttggaacaaaagaaaaatgtagtgttgtagaaatctttggattcagacagacctgttcttgagtcttgactcagtgcttcactgtgtattgaaactaaatgaagatcttcaacttttctattcatgatcaatctgcaaaaataaaagctattacagataacatacaaggtttcttgagcgattaagttttctttttgaaagcctgtgacctgattaagatgcttaaaatgatatatatgtctcttttctgttctttaaatttgaatgaaagtttggcattttaaaaaactttaggtgatttaggagtataattttaagcagatttttagagtacgagtgtccacatatttaactaaacattcaaaaattagttaaaatcaatgaacttgggaaggaaaactacttgctacataatccagaaaattttactaaattatttgaactaagcatgactctccaaactgtggacatattttctcaagggattctatgtattatggcttcaaggtacttttgtgtgtacctcaaaatggctgaaggcattttaacagtgcatctgagagtgtcttacttacatattatttgtacactattttatctatatctttggacattttatatttctgtgtaagtaaaacttccatgaaaatttcatttgtcaccatattttcgttatgcagataagaaaacgaaagaagccaaattgaagacaagctctgaaagggaatgtgcgccctctagtgacccacatttatttatcataaggacataggcagcttttgggtttcatcattttaaataaactttacatttgattttaaaatatatgactcaggattttcaacttgagtatattatattgtatgatcatagatttattactctgacaggatttcatctatcatttaagagaatatttctattaacctgtgttaaggtgattttcttgcacagaagtgtgtttcaaagggactttcaatttattgaaaatgaaaaataggctttaggcatctgtggcttagcagcattttatttcccatcctctgggtcatgcagtttttgcccacgtgttttcacactccttggctttataactaattcctctaatgtagcagtatctgacattttagaatttgtgggggtttcttaccttttaatttttaaggttgtttctctcaaagatatttaaacaaaacttataaatgtgacatctgttcaatcatgtcacactttagaaataaatattaccaatgaattttgaaatgattaagatttaataccaaattaaggtaggaagattattttaacatcatttctacctaccagacgtcaaaatattttaggtaagttttactttgtgcagagaagcaatattttacagcagttttattctcttcactgcaatcaacgattctatgggtgccaagatgaatatcaataccaaataactcagacatttttggcattaatagcttaaaacattaaatcattcaatttgtatgcaagggcatgtattttaaaaagcagaatttttaaacatactaagtatataattcggtatgccataattgataataaagaagatgtacaattttaaggacaatattttgtgcttggactagaattcagcttttgaggcacatgttaaataggcatattttaggacaaggtaaacgccacagaaattgattttttagtatcttttaaagatgcctttcagtgcaatctgaaatcattaaattttactgtactgaaacatattattttatgagtgatgtgcttaaaattacacatataaaactagaaatacatttgagaccatgcaaatataaggaaaaatagatttttgataggaatgttaatatagcagtttccactaactgaagacagagtcctctgtcatctgtcacattgttccaggtgctgtgtaaaccactgaagagtttataggctttttattataactgggaattataacatctttagattttatttaatttgattgctagatgaatagactaatgtaattggaatatgaaagccacaatataagcaaagctgatctcagtttttgtatcttgggtcaaaacctctttaattagagaggtaagtaaacatatttacaagtaatttttaaaaagcatttgtattgtagacccagaaaatctgagacaggtctcagttaatttagaaagttgattttgcctaatcctaggtactcgggaggctgaggcacgagaattgcttgtccccaggaggcgggggttgcagtgagattgtgccactgcactccagcctgggtgatagaatgagactttgtctcaaaaaaaaaaaaaaaaaaaaaaaaaaaaaaaaaaaaagttgatttttgccaaggtggaattcgcgcgcctgtgacacagcctcaggaagtcctgacgacatgtgcccaaggtggttggggtgcagcttggttttacacattttagggaggcatgagacatcaatcaagtacatttaagaaatacattggtttgacctggcgcggtggctcacacctgtaatcccagcactttgggaggctgagtcgggcggatcacaaggtcaggagatcgagaccatcctggctgaaacagtgaaaccccgtctctatgaaaaatagggaaaaaaaattagccagacgtggcggcaggcgcctgtagtcccagctactcgggaggctgaggcaggagaatggtgtgaacctgggaggcggaggttgcagtgagccaagattgtgtcactgcactccagcttgggcaacagagcgagactccgtctgaaaaaaataaaattaaaaaaaaaaaaaaaaaaaagaaatacattggtttggtccagaaaggcaggacaactgggtgggggtgggggcttccaggctgtaggtaaatttaaacattttctggttgacaattggttgagtttgtctaaagacctgggatcaatagaaaggaatgtttgggttgagataagacattgtggataccaaagttttatcatgtagatgaagcttttagctagcaggcttcagagagaagaggctgtagagtgcttcttatcagacttaaagtctgtgttgatgtaagtgtcagagaggtataatgaggcatgtctgacccccacttcccttcttggcctgaaccagtctttcaggttaaattttaagagccctggctgaggaggaagtccctttggagggggagttagccttttatttttggtttacagtatgtttttacttcaggaccagtttgataacagcttttaaatttttacaatttaaagcaagaagtcgctgaagatcgaagaaattaatttacccaagaaaataccagaaagataaaaattagggattaaaacctgtggtgcctgatttacacacacatatatagctatgttatttttttttcttttttgagactgagtctcgttctgttgcccaggctggaatgtagtggcacaatcttggctcactgcaacttctgcctccctggttcaagcaattctcctgcctcagcctcccgagtagctgggattacaggtgcccaccaccacagctggctaatttttgtatttttagtagagacggggtttcgtcatggtggccaggttggtcctgaactcctgacctcaagtgaactgcccgcctcggcctctcaaagtgctggaattacaggcatgagccgccacgcctggccctcagctcagtatatttttaaatgcacatttactttacatttaaagcaacttaaacatacacacaaacacacacgtatcacacatattacaaaatacaagacaatcatgtggccctatcttccccccttccacagagggagacacacttacactatacaaacgtgtatgtgttgtgtgtgtgtatacaaactatcttgatttggagagggaactatttatctaaatattagcttgttttcttttggttaaataggatttcccctttaataatattctgtaattccaaaaatataataattgccatgtagtcaatgcatctcaaagtcctaaaaatatttttagaactaataggatttatactgaatttcatttgatatttttataagatctatttgatgcaaattgaatttgtattctattactcgatttttttttaaagcaaatgccatgtggaaacaagcagagagggacaagttttcccagaaggaaagttgaaaggggaagagtagagagaggttgatcaagaaaaccttcacagatgatgtgcatcttgaactgagccttggaagatgaatagtaggtcatcttcaaatggttggggatttagggtcaggaaagtgcctgtatagtaatatggaattaaaatgtcttctcacttcggaaaactctgaagaagaaaggtgatttttaaaaatacagcaaagttggaaaatcttacctccaaaattatttcttctttaataccaacaaagaataattatagttttgttcctattaatgttaaaacttgcttcctagctaattaaaatgttcattaagaattggtttcataaattatctggtctaggcctagagccctgggaccctgcaatggttaacgtatttcacaggcatcagcattttcctttcaggtttctaaggatgaggcttataagtttttatgaaattctacatgctaagatgtttaaatatgtaaaatggccattcataaacctagttcactaatcaaattagttaagtctgggagcttggaggacttccactctcaaagtttacacatttgggaatgatgagttgcaacttgtatattgaaagtgactgaattaaaatttatgtaaatgtgtcatcttagtttaataggttatgtggcagtcactgtaaagaaaattaacagaacacagtgcccatcaggaggctcttctgacataattagcacagttatatagcactaattcatgtaatgttttactattgacaattcaaaattgacaacttcttaaatggcaaacatttctctagttctttgagatgtttgtatgtgtttttgcctttgaatttattttaaacatttatatacacaggtatctctcagtatttaccatatgggatgtaattaacctaatttacatcatttttatgggaaattcaactggatgaggctgagtctgtttgtacaatataatactgagaaaaattgtcactctctgaatatttggtatatatgccccaggcttttgatattttgaaacttccaaaaaatggaaggtctttttgaaaaattgtcttggtgtagtaatacacttttgccaagaaaaaaaaaaatcaaagacttacttgccctgtatgatgggactttacaagttttaatttcaggggtttctgatgagtatatttgtaaaggagaaaaaaattgtcgcttcactgctaaccataaataataacaaattgaggttttaagatatacttgaagaatagaggacagaatattcatcaataattatagaaataatcattttgtgaacagagaatgagaagttatttttttattagctaaaggagattttaagctaggtaaagttagactgcatttaagggatagagtctgataacattcggaagtacgttaagtacagagttaagtatatgaggaaagtaagttaagcactaaggaatatattagtggactgattccaaaggtgtagggacacattatgagcaacttatgatacataagttcattagcaatggttttatgtgagttgttaaagtggggaaaaaagaattattagaaacgagtaattttatgaagaagcaaaaatacatgtacagaatccaacgttgaatatggcattgaaaataagtcttcagtgttttccttgagggttttaaagaaggtaactgagttgcatctgaatgatatatttcgttcgtaattaaatacccaggctcacttagtgcaaagtatgatagaaaatgccatctgcaaagcactgggaagagtagatagcacccaatttaaagcatgaagacatttaaatcagaggtgtctgttcatttgccatgcatctcagcaaagatatctgaggaatatctagtagcagtgaaatacatgaaaactacacgacaaaccacaaaaagtgatgaagcgatagttgctaaattgataaggaataaaataaacgtgcaattgcttcttggaagccagggtctgagtaggatccgggaaggagactgagttcattgtgcattgaaaatgtcactgaacctaaaactaagcgttggatgtaggccattggcactcagggagagtacatgggaggccttgaaaccctgcctctgcttcctcttcacccttccatcctcattgctggcataaagagatgaggctatccactggcagaatattggagagaaaacaatgctagtagctgacagttaactcccagaactctaagagatggtggtacatgttaagtattagagtgtaggctgactgcacattatgtgtggacaaaaagagttttagcaaggaaatcagagatgtttgaaggaagaagtccaaatggaagcaacataaaataaatattaagattaggttaggaatagctcagagcttgaattgtgtaagaattgggttcagtgtccacctgtttcccatgaaatcaagatatcacaataatgatagaaatgaaagggaagaactccaacaggtgagaagagtccaaactcattaatatgtttctttgttccattttagaaaagaagtataacattaacctctgtgcttatgaataggttattttccttagacaaaacgctctcctcaccactgccctagtaaaatttgaaattgcctttttaaaaatctgtacatcaaaaaacgagcgtaatcactctccatacgatctttgtataaaagggaagttcacgcactgtatgtgacccctttccaaatttataaagtcagacaaaaaattgaatgaggaaagacctttctgtagaatttcacatcctgttgtttgaattgatttgaattatcagaactacgtgccaactggtgtccaggcctcccttaaaatcttcacagacagagaagcaaacagacagttaccatggtgttgactccacaaagccttctttgtgtggagataaccaatatacttggcagagcctctaggctagaagctgatttaatcctaatttacagagaaggtgttttttgattatcctcttaaaaagaccagtgtgagctgagccccagttctgtgtctaaaccatttttatcttgtcaaacaaatgcttcactaaaccaaattacttgataatgtggactaatgcattctcgtctctgttctttatggagttaatagcatgtctggcacatagtaagcacttagtatatgctttatgaaggggaaaaaaaggagacatttgaccgttttaaaaggaaacatacaattttgcctttttcaggaaaatacacctctaaaagtgttacaagatttcttctggggccgggcgcggtggctcacgcctgtaatcccagcactttgggaggccgaggcgggcggatctagaggtcaggagatcgagaccatcctggctaacacggtgaaaccacatctctactaaaaatacaaaaaaaattagccgggcgtggtggcgggcgcctgtggtcccagctactcgggaggctgaggcaggagaatggcgtgaacctgggaggcggagcttgcagtgagccgagatcgcgccactgcactccaggctgggtgacagagcaagactccgtctcaaaaaaaaaaaaaaaaaagatttcttttggaatgaaaattatttactttcaaactaaaaacaaacaactttgtttcttttttctgcagtgaattggaggtggtggtataacagttacatcaacatgcatgttataggagcagaaaggctgtgatccctttccttcctccttatacaggtcatagcagacattcctataacaaaagataggttaacaagagaaaagcatgagatatttatctaataaaagttttaggtgacatgggagccttcaaaaatgaagacccaatgacccaaaggaaaactgtttttatgcttagagttgataaagagtagacagccatgtaggaatgtgattggacaaaaagggaatgatctgatagtaatagactagggacaaccagccaggcctgtctgtgtagaattccttcctcctacacatggggtaggaccccacttgaatgagggtcttatgatctactatcaaacaaaagtatgtcagagaattttttatggctagctaatagagagaaaggtgggcaaaatacagagttataattctggcttttatggttggctttggaggagagggtttttggtttctatgacctaccttgaagaagaagaattctggttactatgactcacttcagggaagaatgtggagttaaagacaggaggggaggagaaggtcagagggaccttggttttgaggctgcttttgaggccttccagtgttctttagttcaaagtttcagcatgccaaagtgccatactttggggtatcgttttctgagcccctacagtgtgcaaacaagagcaatgtcaattcaacgcctagtagaaatctttctccaacataggcttcagcagatttctttcagctgtcatgccagcctagtaccttgaggcacgtttgagtttcagggacctctaagtagaagtgagcaatctttcttagagatagtctaaatcaaatgagggtgagactagagagattaagtttaaagcgtgaatttgaaagtgactggtggatattcctatctcatatttatgagtcagagggtatttgatgtataattgagtcagacaaataaatttcaccaaagtggcccaaatgcattatattaacaacccagttttcaaaatatttatggaagagtcagtgaaggattttattccattggaggaggaacaagaataaagaatagctctgaattactttagaaaatatgaagcgaaatttgtttctacaagtacttgaataaaagacaaagtagaatatacagttaagaggtctatgaaggccagattataaaggatcatgttgaaattttgttctttattctaagaaaaatgagaaagtctttgagtggttttacgaatgaaggtaacataatcagatatgtttttactaccgtatatttcaaagtagctagaagagaataatttgaatgtatctagcatagacaaatatttaagattatggatatcccaagtacactgatgcgatctttacaaattatacggatatgttaaattatcacatgtacccccaatctaagtacatctattatgcgtcaattaaaaaagatagaaatgataatttttccagtagtacataaaagagagagttccataaatactgcccagaggccaagtgaaaagctattgcggtatttttggtcacatttaatggcaacacagatttgggttctggctatggagacaggaagaagcatacatattcaggagacagagaatgtatgtgtgacagattagactttgcaatacattaaacatgggaaggaagagagagggttttagttggtttgctgtaacaaaataccataaactgggtagcttataaaccacagaaatttatgtctcccatttctggagtttgggaagtttaatatcaagtaactagcagatttagtgtcttttaagggcaggcttcctggttcatacttggtgctctctcactgtgccctcacacggtggaaaagaacactgatctcttcagatcattttaaggggactcatttcatgagggctctaccctcttgacctaattacctcccaaatgccccatcttttaatatcatcacattgggaattaggcttcaacatacgaacttttgtggggcacaaaattcagtccatagcggagatgaagataacaaatatgagggatggtgatgctaattactgatctggggaatactgatagagtactagtttgagggagaagatcaaactttaaaccttggcatataatgtttaaggagattttgcagcatgcaagtggagacatccaataggcagatggttatatagctgtggaattcagaacaagtgcctgaattagagatatacatatcagaatcattgataaatagattgcaattcaaggcatgatgactgatgtgttttctggtgagagatagtagagtagaagatgattggtaatgaactaggtcttgacatctagtacataatgatagggtggaggaggatggacctgcaaagaaaaaattaccaatggtcatagaaatagaaggcaaattagaatagagtggcatcatgaagccaaaggaagaaaaattacaaacggatagtatggtcaacagtgttaactgtagtcctagctacttgggaggctgaggcaggggaattccttgaacccgggaggcagaggttgtggtgagaccagattgcaccactgcactccagcctggtgacagagtgagactccgtctcaaaataaacaaatactagaaattggatggactcagatgcttgagcaaaagtaagagaataaagttcaaaatgtaggtagtgggaatgactttaattaaaagaagggaaactcaaatgtaaaagaagggaatgagaacggtggctacatatgcgggtctgatggtgtttggaaataggaagtgaaagaagttctactctgataattgcacttgtttctgtaaggtagggaacaagatcatctgagagagctgcagaaagaggatgggccagagctttgataaaaggttttaatagttcctgtagagacttagagcccaacttgggaaaaaaaaaaaaaaaaaaaagtatggcaggatgctaggttcatttgaggctgttgattattgccttagtttgggttgccccaagagtagatctgaagagaaggatttaggtgcaagcagtttatttggaaagtgatcccaggaaacaaagtagggaagtgaaataagaaaaataaagcagccaataaagtatggcacaaatatagggatcaggttactgctggaaggaactggggctcaatcatgcagggaaccccttgagacactgtgtatcatacttcaggattgtccaactgaggggcaagggagctgggaaattcaccaattccaagctctcactggttaagggacacccctaaagtattaacattccagcactccttctctgtccaatatactggcaaatagatgcttgcagatagagagacacaggaaattttatgttgggccaaagcaaaaataaaaatgttttaagacattatgatgataaatatgcataaaagatgattgaaatataattcactggtttgggtaggtaatcaaataaccatagtaggagagtatttaaggagttaacatcgctgaagagagtgtgaaagatttttacagcatataattgtactgtatattttaatcaacattatgaatgaagaaacaggaacctgatagtcaaacttgtggataaaaaatgtaggaaagataaaaatcatatatgacacaataaaaatccataaacatttgtaatgcatacacagataacttactgacattcagtgacatgggatttagaggaatcaggatccctagtctcttaatttcaagttggatagcctcgataaataacaactcaatctgtatgctatgaaccgtcaagtttctgacccatggtattgaggtcaattaacttaatttctctgaagctccatctcatcctatgggcagctggaattggtgatacctaaccaaagaattttgtgagaatataaaatgcgaatatgtttttctaagggctttgtgttccattaatttctgtatctgtttaatttttaaacaatagcctgcaacaaatgtgagaaattctaactggtttatatgattcaaagtcccaaaactggagttcaatagatcaggtcatatgtttgtgatagtaattaggttgtgatataactggtttaatgatagtttatgtgaaaaaattcctagaagttttaagtcaattgaattgcaatgtgagttgaaagtctaatattgaagtgaaaatatttattgaaatcatgggctatatcaatgaaagtattataaaccagaaagataattattcttccctgtttattttacacactgctgatatgttccctttaagtacccaatttaaggaaactaagataacaacaagccatagaatatccgttgaagtaattaagcatagggtaggctgatgatcaggtatctactgataaatttaaagagcggatttcaaatatttataattttgtatccttttgccaatatctttccaactactctccacccccaccagctcctggaaatgaacattgtcttctgtttcttttagtttgatttttttttttttttttttttagattccacttgtaagtgagatcatgtggtatttgtctttctacacctggcttatttcacttaacataatttcctccgggttcatacatgttgttgcaaatgaaaggctattcatagtcttaaaggcttaatactattccattagacacttgggttgattccatattttggctcttctatacctaaatcaccagattagaatgaataatttatccctggtggctccaaagatctcttccaaaaaaaaaaaaaaaaaaaaaaaaaaaggtttgaaaataacaggataggtgatctgatatttatggcagcataacaactcacaccaaaatgtagtggcttaaaacagcacctatttattatttctcctaattcttcaacgtaggcagtgccctttgggtatttcttttctctatgtggcatcaactggagcactcatttgtctgtcttcagctggcattgagatgggtcacagagggctttatttgcatgcctggtgccccatgcttcttcatgtggcctcttcacatggacagatcaagtttccttaaaacatgatcacctcaaggtcattgtacttcttatataattgttgtcttctcagaatgtgtgctctaaaaagtcaagctctgacatgcaagcacttctcaaaaccttacttgcagtactcttactattgtcccatttgtgatagaaagtcacgtggccaaacccagaggcagtatgattggagactacagaaaagcatgtgtttcaatggtgaccaccaacaggaattttttttttctcataaatactttccaaaaagaaaaggttatcgtgggaagtagtactttttcaaatagtggaaacattcaagcagaggctgggtaatagcttacaggatatattgtagaagtgatttttacattgaggtgaataaaatgacctctgtgatcataagactctagatcaaagctgactccaaatttgagtctacctaacagggaaaatagtgctgctattaatactaatagaggtgtcaggcaggagtctcagattgagaaaagaatgataaatgtggataaattgctttttttaatatagaagaaagagataatcaagaaataatgacttttattttttgctgtcttaggttggatgttgatataactgaacttcacagctggattactcgctcagaagctgtgttgcagagtcctgaatttgcaatctttcggaaggaaggcaacttctcagacttaaaagaaaaagtcaatgtaggttatgcattaatttttatatctgtactcattttgtgctgcttgtaaactccgtgctttgttatctgtgattctactagttgatagattaatgcgatatgataaaatgctgtttaatatgtcttaaaaatatattttagatagcaagcaaaatcaaagtttagcctagagaaatctttctggattcttctgtgactgactagggatgcctttcataaacttgccttaacttacatattatttaactataaattaacaattttatgacattaattcatgttgattcctttcatatattgttcagttacctcaaggctaggccttagcaagcttgcacaattgtgtagagtagaatagagtaaaatagaatagaataatataatagataccatacttaggactatgtctatattctcactgttatcaaaaagttattctttatagtcatcaatccctgtcatatattataagatatttaaatttcccagatatttgtgtattaccttatctaaaaggtgtccagcctttctcagtatttacatgtggtagcagatgctttgttgttgttattcccttctgagatggtataattttgaccttcacaaataggaagttttattaatttaatataaagtgtttcatctttagggaaattgtcaaggctttaatttttcaacttcaacaattataaaacatgcatctttgtatatgattggcaacagtttgtaaaataatttctaacaggcagagtaaataaaatgggcaagctaaggaagcagtgattatgaatgaaaagtaattttatccatgggaagatcacatctaaatgtgtatattagctctgctttttctctccaggattcaaatcatgaagttcaaaatccattgtatttttacaaatacgacattacctcagttacaagctaatgtttgctgttggggttggaacttttggagatcaacaaaagatatatatatattctggaaaaaaaatctattttttaggctgcttgaaaaagggaagacaattttgtcaccagttcttcttagagttaactacttataaattggaaagctattttaaattacttattagctttataagacatgctgttgtcagcattataatagactattctaaattgtttcaagaaatgggaaatatgaaaactgaaagataatatataattgtagaaaattagctaaatgtcttttttcaagtatacttctttgaaggtaaattgtttgctgtgatttttgagggaaattctcttagtagtagaaaattaattagagaacattaaactctaattttcaaacatcatgttacatatttgaccactgaaagtatgaatcacctttagcattttattagctaattaaaaatgattattgatctgattctcacaggtttctgtctgatactctgtttctttatcttaagacagctttgatcaggcaggaaaattgagtttcagtatttcaggaatataaattttaaaagttcctgttatcatgtggttacctatgaacgatttgcattttatcaatagcgggagcatgacagactaaaagtgctcaaaaatgtacagtgttttataactggttttctgataccttgtgagtcccctttatcaacctgaactctcattttctgaaataacaacatcattcttaattgcctactaaaatgggacatgaaatgatttaccttgatgtttccctcaggctaaatacaatgtatatgtattaaaaatccttgagagaaatacataattacgatgatggatattcagtttaggtatccattaattttcttactacatcacctgtcggtttatataggttattttaaactcatggcaggctcgtgtcatgaacttgagtggtattaatccatttttaggctttcattaaaaatggctaaatattaccaactcttttttttttcacttgatttcttcatttactcctttcaaatgcttttagccagttagcatatcataggccattatcagttcaatttcacatattttaaaaaatgcaacttttaaacctaagcataattttttccttgtatattcaccatgtgttttattcatataattaacaaaatgcacttatttaaaagctgacttctgggggacctttctaatcaaaatgtccctggaccaccaatattgacattatctgggagcttgtcagaaatatagaatctcagaactagtaaatcaaaatttgcctttgaacattttccaggagtgattcctatgcacataaaggctcgagaatcaatattctaggacacaatcttgggctttacgtagcagttacctctcacattcttttagtatcactgcagttcagactttttagctgaattaacagattctaacaactcgaattttttccgtgagcacatggtaacgcaaattggtaatgaaacaaacaaaaaaaatagcctcctttgatcacaaggggatttgataaggtgtctgaaaatctggagcttctgtgaggttctcttgaaaccctccctatcaagtcgttatggtcatctggctttgggctcttcctcggatctgcacttgattaccctctttcagaatcaactttttaccaactcccgctggaaatcatcaagccagttaatgcttccaatttctcctatctctgttatctgtgtttactacccagagtataggtacctcgagtctatattttcttctatctttctctctctgctctattgcactttcttttccttgcttcacttcctctgctttcccacactctcactcggcaggctcaaacactttttcaagacaagccttctatatacttattctactcatacgtggaaaccaattttaccctcgaaaacagcactatgactcatccctcttttgtacccccactactttagaatgactgactccctcacctaacagagacaattccaaagatactgctctcttcatgtaaaaatacctctttccttgcagttaatgacttctggccatctcttatctaccattttatcatattttctcattgaagactttggcactaggttagtagattttttcaaccaatttgttctttcattcttagttatttcagcatccctgtgggctctcctgctatcactaaaagctgttgtttctctcatctcctcaattcagctacctgctgtcatgattgtatgtatgtagatgttgtcattgtcaggcattactccatttctttaataagattatttttttgagacggagtctcgctctgtcccaggcgggagtgcagtggcgcgatctcggctcactgcaagctctgcctcccgggttcacgccgttctcctgcctcagcctcctgagtagctgggactacaggcgcccgccaccacacccggctaagtttttgtatttttagtagagacggggtttcaccgtgttagccaggatggtctcgatctcctgacctcgtgatccgcccgcctcggcctcccaaagtgctgggattacaggcgtgagccaccgcgcccggcactaacaacatattttaacaaaaccagcagttcttcataagctttccgtgcatcctaagtatattttcaacttagtttctctcaacaattatttcaagcttttgtggggtacctaaactttccccatcattcacagtaaatgatttcatctcctactttagtcgaaataatatttctcaaattgtgggtatttgtgctcatagtatcttttttttttttttttttccacctgccttagtggaagaggctatccttcacctggttgaggctcatctctgggtgtgtgttctcagcagcatcactgactatgtattaagccacctggttccattcagctgtatatccagattgtcaaaaatctacatcccaggtctttatcattagcttttaaaccggttgtgttttcatcttttagaacgtgtcctctcctataaacatgcatgtgaatacttaacgtgccttatcttactcaatccctctgtagaactagaacctattaacctcttttccctcatgaaattctttcctcgcttggcttatgggatactgctttctcctgattaattctttcacattcttggccatttgttccaattcagtttttctttaatattgatattcttcagagtccttgtgtttcttctctggatatcctcattcattcccattcaaatagtgtctattttcaaatgaacccttctcccatatgtatctttagctcatctctttcttaaaacccagggtgatatatctgactgcctaatagacaattttaattgatgtttgcctgatatcttaaatctcattatttccccagacctcctttattctttctccttcctttcaccctgcaaacagcctaatccagaaacctgaaagtgaactgggtcacctagatttttcttctaccattcacaagtccaatctttgacaggttcaattaatcctgctcccttaacagctcttgaaaatgtccagttctctctattcccatcaccaaaaccctgattaaagctaatatcatggcttacttctatttaagatgacaatcctgtagctggtcttccctgctactaatgttatattcctttagaagtttccacatcacctctgccaaagcgaacatattaaaacctcagtatgatcttgttatgtctgtgtttataatcatttgagaaagataaaatcagctactgatagccaggagctggcttggcacttcagttaggctttggaactgctagatgttgccttggtacttgcagccagtctgatgttctctggttgaatataaataattgctagggatgccagcatcatacagggacacgctatggttgtgatgaatcaagataaaagcaagaccactttgtaatcatatcttaatacagtaaaaaagaatagcattgtccaaaccacgcctaatgaccaaatatccctcatcttcattaatgtgacacattatgcttctttactaaacacagctttagcctctctgcattcctcctgccatctagataaaaattttaggacactcaacatagaattaccctacttccttacaacatccaatcaaaacaaagccccacttccttgatgccccctatcatgtaacacaagcccacatcttaaaataagctttttctaacatactcttagagacagccccatagttccctgtgatgcgctgtctctctcgttgcagcgtgtaaatcaggttaactttgataacctacaaatatgttccagtggtctttgtctgaagagtgttgacaaagtccatgtcttcatattgccctcttaaagcctacaatgatctaatttttgtttacttgcacaaactaatttctagccattttcatttcaattccattgttggtttctagaaatcaggacttgaacgtgaagtggctttggttttatgtgtgtgtgttttgtttttggtgtccccatgcctaacacacaaaccaataaatgtttaactatatggatatgtgatttttttcagttctgcagttgcatttaagataggatctattaccaatatgaaggatagaacaacttctgaataaacatttgagtgaataagttactcttcagtcaaagggtaaaacttcattatagaatgttaaatgagtagattcttaattacttctaatgtcggagtaggactgatagagatccataacttattttcataatgttagagaagatacagaaagaggaggcttttaagaggtgctaataaagaaggaggaacagaggtctgaaagaggttttaatcaacttattgaggaatttgtgaacttccctgtgttgtattctttgcttcaaattattttacttttcttccttttattgaatattatataacttagttgccttttattttgcatttaggttacccattttagtatttataattcttcatgatctctaagaattttcatgagcccacaataatcactcatttctgatacattgatttactgatgccttttttagcttctgtatactttacttgaaattatgtgtactaaataatttagaatccgagtagtggcttctaaacatgtgatcatatattaagcatatattgagtaaagtatttagtattctatatgttaatagcataatttaaaaactgtatgttatgaaatatagatcctttcaagattaaaaatgtatatgcatgtagacacatatatgataaacagctctatagaaaaacacacatacagaaaagctggatgacttcatgaggacgaaatttaagagaaagataatattgtcaagggcagaggtatttttatgaacatggcaatttcgaggaggtaattgtagtttttatcagtactgaatgttgtaagaagcatttttcctaacaagaagaaaattaatgactttcttttctttttttttttttttttttttttcccgagacggagcctcgctctgtcacccaggctggagtgcagtggcgcaatcttggctcactgcaacttctgtctcccgggttcaagcgattctcctgcctcagcctcccgagtagctgggactacaggcacgtgccaccacgtccagctaattttttgtatttttagtagagacggggtttcaactgttggccaggatggtctccatctcctgaccttgtgatccacctgccttggcctcccaaagtgctgggattacaggcgtgagcccctgcgcccggccaaattaatgactttcacaaaataactttttgtacagtagtgaaggctgaagtctgactgtaggtatttggagtaatattgaaatactggaatttggactaatatggtaatattagtccaaatttcattgaagatgaaatatataaaagaaaatgaagactgtggttgaagagtattcagatgatacccttggtcttgaaaacatgggaaaggggtatatatacagtatgtatgtgtatgtacatatatgtacatacacacacatagagagaggaggtggaagatcagagccatgaaataaaaacagagaggtaagattctaccaagttttgactcatggattgtatatggtactctttcttttctacttaggtattggtttattaccagtatcaggacttgagctgaagaaaagatggatgtgcccaactccctaactaatatgcagtttctagaatactttgatttaatccatccttcctttactgagcttgcagcacctgtccccatgtactggttttatggccactttatataaagctattagagttcgttatgaatttgcactttaagagagcattgtgggtaaggggagagaccataatattgtatatggacgcgttacgctaaaatagagctcgccttattatgtacctataatgtaccagccactttcatggagacttgggatagagtagagaaggatatagataaggatacctgaccttatatagtttacattctagtgggaaagatggaaatgaagcaagactaatatgtaaagcatgtggaatgttagtgataagttccaaggagcagaataaaatgagagggtatgcatgtgcttgtagacagagtggcactaaaaggcctagctgaaaaagtggcatttgatgggggaaaatgtccaagtaagtaatttagggcctttttaggcatggggaaaaataaatgcacagccgtgtaacagcagcatgcctgtagcatcagggaaaaggtaagcgtgtggctgcagcagaaaaatcacgatgtttagcagcagaagaattcagaaaggttaaggaagttaattaagatcagaccatggtaaggacttgagcttttattcagctgtcagcgagttgagctgaatcctgttgtctctgtctgctgtgttgataatatataatcagagaacaaagggtgaaatataaagacctttagtatcctattttgaaacattcatacccctcagagatgatggggtactttgtctaatgtggtagtagtgagcaccatgataactcactttctggctatgttttgaggttagagccaacaggactttgtgatggattgaatgtgaggcttgagagagagaggggagtggaggattctgtttttggcctaaacaaaggaaaacacagattgaggcctaggacactccaaagtgcgagctcagggacatgattaggaacctgcaaaggagatggaggaaaggtgacctctgaagttggaggaaaactgtgttcaagtagtacgtgaagccaaattagcaaatacttctaagaagaaaaaggaatcctctcaatcaaatcatggtgataggtaaagtgagaactgaacatcagtcattgaatgcagtagcttgggggccaatggtgagactgataagagcagttttgatgggactgagtaagagaatagatgtgagagccagtttttgtttttgttttgaaccagtttttactttgcaagatagacctgtggaaggcctatgttcctctttgttgatacacagtcacttaaaatgaggacagttatcttcctttttcagcaaaatatatctctttagactttgtttttggtttttgtgcttttctgtgctttttaatgtatatttctgtgagttaatgggagacggtagaaattttaggaactactgatccaacctacctgaaaacagaagttcatatatttcatttgaggacgaacgtatgggtggccagatcccaggagaaatggcgattttcagtgatgtttatttacttaacctttttttttttttttttttaacactttttatatgtggttatttggacatttccacgaacaaggtactctcatcatctcttgtgtcaaaaatgtttccgtggccaggcacggtggctcacgcctgtaatctcagcactttgggaggtcgaggcgggtggatcatgaagtcaggagatcaagaccatcatggttgacaccatgaagcctcgtctctactaaaaatacaaaaaattagccgggcatggttgcgggcgcctgtagtcccagctactcaggaggctgaggaaggagaatggcgtgaacccgggaggcggagcttgcagtgagccaagattgcgccactgcactccagcctgggcgacagagcgagactccgtctcaaaaagaaaaaaaaaaaaagtttcctaaatttctttttaagattattgaagttacctttaagtagaatgagcacatatttcagtttgtcgggtatagtcttagcttatgtcaaaccatttttctcagcttaattattcctagctccccattttactataaaaactatctcattttgggaaataaatagcgagcttcctttaatcccctcagaagtcccacatggtaggtatctttattgctattttacataggaaatactgaggttcagaaaggtcgaagtactttattagggacagatagtaagcagtagagacagaactgataacagcagagcaaaaagggtgactgcaggcccttttgttgtagtatcttctttaacatctctttgttatactaaattttattatttttaatcaactatctacagctgtgtctgaaatgaaatgttttctgggctcttcactgtctcattcacactcttcaaggcatacttgtatgcatattcctcttcattttgcaatgttcctcttgaaagtaatgtgccctaacagaacccagatatcgtctgaacattgacaaatatgcagataccattgactgcttctttctggggtctatgtgtctctttatgcaccagttattcagtttatttgagctgtatacagagttggtaatcagcctatagactgtcagagaccattctgagtgacccggcattccttgtgatatcttgttggccctgctgaattaatagttaaatatgttgaacatccctaatacatccaaactataagctctgtttgctctgatatatattctgatacgctcacacctttttgaataatatccattgaaatacccctagcaacagcagagcatgtctgaaagaaagctgaaattataagtagaagagcagggttctaatattgaatctaaaacttcctaatatgatgacctttgatatacgatttaatcttactgatgctcagttttctcttgtataaaatggtatacaacaatgctgatttcttctttcttacaattattatgacatacatatggaaattatgtacataaactataatttggtagtataaggaatcttattttcaatgtggctattgcattgttttcaaaattttcacaaacctctctgtgcctcacttccctcctctgtcaaaatgggaaagtaatagtacctactttatagattattgtttttgttgtagttgtggtggttgttactgagactatttatattagaataactggaacaatgtggttaacaagatattaaaggtcaaatatgattcctgagatattcaaatataagttttgttctctgttagtaatattaattgattctagtaagcttagaataaagagattatgatgataacatttagagggctattgataatttattttcaatatttataaagaccacatagtgttctcattctactttttatatcatttcacaaaaactaaagcaaaagctcaatgtagataaaatagaaacccctctgataggagaagataactctaaaagtaactcaaagaacatcactttactcagcttgttgtcattgttcctttatgtgttgtattgtggtatatattttttctttcatctgtatattgttttctggataaagttcaaattctggacaccccaaatcctcctgtctttcttgatatttacattacatatttacttaaatgtgcttattttttctcctctaagatgctcagggtgctttccatataacatttaccttttaatggagaataaatgtaagtagtgaaaaacaagtatgccataagctgctaaggacagataacttagatcacaaaaactaataagttgagaaaatagaaatattggagcttcatctaggatcttacttttaactagatgttgtagctactctattttcatggacttttcagttcaaccaacaaattagaaccatccatgattgtgcacgttcctggaaacaattcaatactgtctttgtgaaactgaatttcaagacaactcagaagttttacctgctaattggaaagggatcctgggaacataaaatcacaaaataccacaaactgggtgctttgaaattttcaagtggaatgtaagatattaaaaagtgtctgtcactttcagagtttcttaactaattagacaaaactgagttttcatttgttgcccttcagagcaccatgtaaaatgtgtatctttcagctaagagataggtatttaagaaaataaaacaaaattactaccttatagattttttttaaattttactcttaatttattctcagttttaattagtattttatatattacagctattcctgatggagtttattctgtgaatgattggcttttttttttttttttagcattttgtactcttgatattgaatccagtattcctaattcatgaaacctttttttgtgattttaatagactccatttttagagtaattataggttcacagcacaattgaacagaaggtacaaaaatttcccatataacccggctcccacagatacatagcctgccccactgtcaacatttcccactagagtggtatatttgtttcaacagatgaacttacattgacacatcattatctcccaaagttcatagtttatacattagctttccctattggtgccacacattctgtgagtttaaacaaatttacaatgacatgtatttatctttagagtgttatgcggtgtaatttcactgccataaaaatcctcaatacttttcccgttcatctacacttctctcctaatctctagaaaccactgattgttttgtagtttacatagttttaccttttccagactatcatatattcggaattggaatctagggtgaaatcctgcggtaaaatatatagccttttcagattatcttctttaacttagtaacatgcatttaagttcttccatgtctttttatggcttgatagctcatttttaagcactgaataatattccattgtctggatgtctcacagtttatttatccattcatctactgaagaacatcttgattgtttccaagtcttggcaaatacaaacaaagctgctgcagcattcatgtgcaggaatttgagtggacatatgactcctttgtgtaaatgcctaagtgcatgattgctggatcatatagtagaatgtttacttttgtaagaaacctccaaactgtcttccaaagtggctgtgccattttgcattgccaccagaaatgaatgagagttcccattgccccatttctctgtcggcttttggttttgtcagtgttcttggattttggccattctaataggtgtgtagtggtatctcattgtttaatttgtaattccctggtaacatatgatgtgaaacatattttcatttgcttatttgccatctgtatacttcctttggtgaggtgtctgttaaggatttttgcccatgttttagtttgtttgtttttgttactgagttttaagagttctttgtgtatttcggataagaattctctaccagatatgtctttcgtaaatattttctttgagcctgtggcttttcttttcgttcttttggcagcatctttcacagagcagaaccttttaacttagtactattcaacttattaattctttctttcatggatcatccctttggtggtgtatctaaaaaactatcaacaaactcaaagtcacctctgttttctccactgctatctgctaggagttttatagttttacattttactctagagtctgtgattgattcattattaattaactttatgaattatatgaacaccacaattactttcaagcagttacacaaatttctaaattcagtggaaatgtatttatttttggtatgtttatttttcatttttattttattttttataatttcaacttttggattcaagagtaaatgtgcaggtttgttacgtgtgtatattgtgtgacactgaggtttggtgctgagcatagtatccaatagctactattttggaccttttcccctcactccctccccactctagtagtccgcagtgtttcttgttcccatctttatatccatgtgtatccaagaaaacatggttttcaaccataatgctgtgttccacaaaaatatatgttcatgttattttattttatttatttatttttgagacagagtcttactctgtcacccaggctggagtgcaatggtgtgatctcggctcactgcaacctctgcctcccgggttcaagggattttcctgcctcagcctccagagtagctgggattataggtgcctgccaccatgcccagataattatgtttgtatttttagtagagacagggtttcaccatgttggccaggctggtctcgaactcccgacctcaggtgatccacccgcgttggccccccaaagtgctgggattacaggtgtgagccactgcacccagcccatgttatcatttgtacagatatattcaatgttgaaattttaaagtgaatttgtgataaaattcacaataatgtcagatatttcaccatcaaaagtataaacttccaatgaagttgatccagtgaataacatgaaagtaaataaattggaattaaataattgtaattaaaacaaaagaagggtgtaaggtttatgcctagataaacttttttgcatgtagatgttgtgttgttcaggaccatttgtttaaagactttttctccactgtattgccttggttcctttgccaaaaatcaattgattatatttatgtggatctgtttctgagctttctattctgttccattgatttacctgtctgttcttttgccaatattactctgtcttgattactgcagttttatatcaagccttgaagtcagatatcgtcaggtctcccacttaggaaactctttaaaataaatttttaagaaaacctttattcaggccaggcacggtggctcacacctgtaatccccccgccccaccccagcactgagctgggcggatgatgaggtcaggagtttgagaccagcctggccaacatggtgaaaccctgtctctactaaaaatacaaaaattagctgggcgtggtggtgcacgcctgtaatcccggctactcgggaggctgaagcaggagagttgcttgaacccgggaggcagaggttgcagtgagctgagatcatgccactgcactccagcctgggcgacagagtgagactctgtctcaaagagaaacaaaaacaaaaagctttacatttgtagctatttctttaaattagatagtcttttcagatacataaaaatatgtggattattgtataagcatttacataatttaatgtgcttagtaaatagtgttgtctagatgattactttttctctgcaactatttctgatattgccatattatatgaaagagtttccctctgtcgcccaggctggagtacagtggcgcaatgatagttcgttgcagcctactcagactactgtgctcaagcagtccttctgcctcagattcctgagtagctgggactacaggctcctgtcaccacgcctgactaattttttaaaattgtttgtttagagatggaggtctctcgattttgcctaggctgatctcaaatccctggactgaagcagtcttcctgcccaggccttctgagtagctcggattacaggcctatctcttaactatttgcttttaaaggaatgtattagatctgcgctgtacaatcacagttaacactggtcacatgtaacctttaaattttaaattatttaaaataaataaaattagattaaattaaatattcttttattttcaagtcatgctgaccacctttcaagtgctgaatacccacatgtggttattggctatcatattggatgacacagatacagatcatttccatccctgcacaaatttatactcaacagtggtgcagactgtccatgtatctgttatttgccctcccatctgtactccagtattttacctggaaatatttttttaaatgcctgtggatgtaaatgaagtcttaaaaaatagtctcatgtagaataaccttctgcctcaaattcaagagaaatctttgttataatatgattgttaagtcacaggtgtgttgttcttactatattttaattgcgttatagttatttgaatagttatgttttaggacatacacattgttatagtcaacacttcttgatgattatagtaatgtagttctactctgtcatagtttaaaatttatgtctccataggaatattattagctaaactcaatagtatgaaattctggctattgttaactgaaataattttgcatttgtggttcaaaatgtaactcttaagggaaataaaggaattcagaaagttttttgaaactcaatcttgtcttccttggaaataggagtactttgattatttttgaaagaaaaattagcctacagcctggtatttaaatatatatgtacatatattatatatttctgctaaattatttatggtagtttattttttccatcttatatacatactggattctcaatttgatttttaataccgcctatatacttattagtaatttcaatggtgtatctttaaaagataaatttcattttagttatgtgacactttatctttcattgttatgaattgcctttttactttttgcagtcttgcgttgaaatgtatcagaaactataatgtaaaaaaaagctgagtagaaatcttataattaaaagttgtagcaagtcatgaaaatggctcatgcttttattgccattttgatgtttttgatggcaaaagtgttgagaaaaagtctttagattcacgtgataagctgacagagtgaaacatcttaaggcttgaaagggcaagtagaagttataattattgtgtagattcacagtccttgtattgaattactcatctttgctctcatgctgcaggccatagagcgagaaaaagctgagaagttcagaaaactgcaagatgccagcagatcagctcaggccctggtggaacagatggtgaatggtaattacacgagttgatttagataatcttcttagggatttgataaacacataggttcatatttatcagctgaattatatcagacaagcacttgttaaatacaaatttaaattaaaaggtgtttgtatgttttttattattctttttttaatgctaaggaaattattaggagaaattcaactttgagttcattggaagaaaatgggatgtggtagaatattttatcagtctgtagcagagaaataaattttaatgcaaatctgctagaatttatccaaataatttaagaaaataaggttaacagaaatttgaaaacattaacagtcatgttatatgtgtaaaactgatcatcatctgattttaaatcatttttgcaatatgtttttccaaacactaaaattatatggaatgttttaccgtcattcctgttttgtaataatatatatgacattttctgtgttactttttatcacttcctctcatttaaaaaagaagtctcttcgggataacctttacttttaagtaacttttttagagtgagataaaagcacaaagctagccaagtttttgtctttctttttcaagaataaattaaaattaatcttttctaatactcagtgcctcaaaagttatgtgtaccaaatgtgtcattgacatgatatgtaaacaaccttctttcaaattatcattgctatactactatatttccagataaaattttacgaaaatcagggataatgctatttccaaataagattatttttcattttgtagaagacgtttacaagaacatcataaataaatacaacaaatgtttttgttgtgcatgtcagcttttttcagaatctgcctgcattttggggcataaattctgtgtataagttattttttgccttaattgcaaatttggcattcaaaagttcagtggtcttcctagaaaatcaattcattttcttcttctaatgagtcccatgactgactgtatttggttaaaaatgaaaacaaacaaatataacaggtgagacttgagtgaacaagtttaagaacaggtaatgaaaataccagtagatttttatttagatgtatgttgcttggtaattttaactgatcaacttaacagcatattcatgttaaataaaattatgtgatctaaaaatattctcctagttgttatgtaagttccccctagaaactgtattatcactttttcattttaataagctgatgcaagagctatactttaaatggtctcatgtcatagttatatatcaagcttacctacactgaattaatcagaaataatttaaacatttagaaattacgggaatgatttttaatttttggtaagtaaaactacatgcaggatttaaatgatcgtgtgactagtgagaatattaattttcttgattatttccctcatagttctaatttttggaggcatgtagaaaagtcaggacacatagtaggtgcttagtaaatattaattgaccagattctgtttagaaaagcaaaattaaggcagtcgttgaggtaataacgttggtaattttggtgtgaaaataataatccatctgaaggaaaatgctaactttggcagataccagggaacactggggggtaggggtgtgatttgagacattcctgtttggttgactgtgttaatcaaattttatgctacccttttgttctaccagtaaagatatggtcgaactgatacgtcattaggctcaagtttgggccataactaggatgactacttaaaatgaccatagctctgtttccccattaaataaaataatttatgaaattacttaaaggctcaaatattctaacttatctatttgttccgtttttgtcgttcaaggaacaaattgcataatatttattttctgtgattgtgcaaattgtgagataagctagacacatattaagtgcctgaagtaccccttcaggtgtatttcagagggactgctaccctaaatcataatagctcctttagtatagagcccaaaagtacagttgagtggtgtagctcatgaagctgaaagacaaatgaagctttctgtaaactaggagtccagcaattattgcattaaagctcttaaatttataagtccagaatcttccttcccaagcttaggctatggagatataataaatctcacaaccacgtaagacacatacattcttgccctttttgtatagaaaggaaaatgagagctgaatcagtgtgcttcatttaggacctcatgtaaatggctgttcctcttaaccacgtatagtttcctcagaagttaagataaagatgaaccactcttgtataaaccactcatattattatgccactaataaaaatatgtgcgtatatatttataaatttgatgtgtgcttaccacagtgaaaatatttaacatatattcatagtgtaaaaatatgtagaatagcataagtatagctattatagattttaaaaaattctgtgaactatattttatatgtatctatactggtatatgcatagcaaactgaattttctacttaaaataatttgccctaagattaaactactttttaaaaatttagaataattttgtaattcatcagtttgcttttagaatgaaattccaagatggaaaaaataatttctcataacttaaattttacttcagttttgacctgaaatggtacatcagacatatttccaaatgatttctgtccgtttctaaatgtctatgaagcattgaagattcaacatcacttaagtaatgcagaaaacaaaatctgtttgtcctgaaggcaatttgttgaaggaatttaagacatatgctgagaagacaggatagggtgttaaggttgttgaaagtacaaaatttaccatggttacaatgtagaagggaacctcatttgatggtgcaaagtattgttaaaaatcagttgtacgttctagaaacagtatgtctagtaacatatgtacagtttttcagtgtcacatacaagttttatgatcaattggaagatactttttattttcactgtattttatcaaatgtgaagagttgtatgcagaattttaaaacagttaatattaaccatatcattaattttacagcaataatttgtatattaagagtttattgaccgtaagagattcttactaatttatttggaatttttaaccaaagaaatgagttggccaaattccttgcctgctttaaaactatacatggacgttttccttatggatgttccagttcttttggtcagagtagaagtgatctttcacgatcatagactaaaaagagaagctactaaaaggagagtgttaactaaaaaaaaaaatcacgtttctggcattttggcatgaaattttggtataatttttaactgatttatctctatcttagctgtattttttgtttgaactaacattaaaattaatttactgttcttatgtcagcattaattggttggataaatgtgacagaatattggatggtgcaaagtacctctttttactagagacatttttggatagctgtaattttcatgcagcttaccgtcaatatgtaagctttggatcataaccctggtctcaggaaactgttaacttaatgagggcaagtgagaggctagaccaggtatctagtgatgtatttatatattcatgtagctgtgcatattgaaaagggagtttccaaattctttattttactttttaagaaagatgtgatataactttaaggtttatttttacatttcttaatttaaatacaaaatgttataaataatttagaaatttagaaaaatttagccattaaatatagtaagtaatctttctaatgctttaataatattgctaactaataatggttttctaagattttaatttgaacagtctttaaactgatgcctttcatgaccaaggcctttcagtgtattattgagattgtggagttttaggacaacctagggctaaaataatatacatatgattatacctaaacatatgtctgtttttatctatttaggattagacgtaatcctttttgtaaaacagtgttctcgcatgagtacatacagtctcatcaatcaggcataacacaaaaaagcctagtttagataaactggttttccatattaatactgaaattaccaaaagatgaccatatcaaaacatttatttgaaaacatatgtaggcgtagctcaggttctcgttctttagtctctaagatcctttcaccataatttctagaggagatactataattatgtaatagggttagttaaattgtgattcattttcaatttctatttgtagttttctgtgtgttaattaagagtctaaggacagtcacatcaaggacatgtttaaataaaagtagtaattattagtatattagactaaagaacatctcaaaactatcattccctgagtgctagattatagtgtttaaggtgatacctgataataagtatgctaactgttgtaattaaatggcacagaatgataacactgacgagagctcttcttatccataacattaaccaagtaactatctttttttcttgtattttggttcatagctcattagataatttcacatgaattatgttatttgaggtgggcaaccagattttgtcagatgggtgagggtagggattatggtcagtctggctcatctcaaagctaaaactctcatgatcactggaaaaactttcagtagcagcaagtcttctaatcatatattttaatggcaagacatattgcaaatagtctgtatacaaatgtggcatggagactgtaccacttgtagtagcccagccccttcatcatgaatgagtagccttccacagttgcatatatttcctcttctcttattccttcctcagtactgggcagtttgatttatatttcttctttctccacatgacacttagtataatgctctacacagagttcacattcaataaatgtttttaattgacaggcacatttttcttcgtttaagtctaatctccaaaaggaagagcctctgtgggtgtgtgtgagcacggcgtgcatgcacgggtgaactcgcatgcgcagacatgtgcgtgtgtgtgtccatgtgtgtgaaagaaagagactgttgttgtcactgttgttgtgggaaatgagtggccaaaacaaatatgagtaaaaatctgactttttttaattttatgatgtttgaaaataaaaacgcaaaagggctatattagtaaaatttatattgccctcactaggggtattacttttatatatactattaatttttaaaagctattactttaagtcagtgtggtcacagaaacctctaaaatttagcctcagaacttgtcttcacaggttttgaatatctctatattacattttagactattacattgaatgctaaatggacttgtaataaccctcacttaaagttcagcaaaaataggagactgtttattagcagctttattttaagtttctattccaaatattcttttaattcaagagctctggaaacacttgttttgtgttattctaccctggcttcatggctaatgatgaatatacttgatgaggaatacttcactttaagtggcagttctgaagtacttgcatggaaggtggtgcacatttaacattattctaacagtctgttatgcactgtacacaagtaataaaattaatggatacacttcaagtaatgatccatttcctctgggtgcaatatatttattcacagactatttcaggggttgtttagaatatgagatgtgaatggattatgatccattatccctgagattctaatgtgctacaacaaaatggtttccataagtattgctcataatgcctggtgtgttagtatttgtattcttaaatagctaacacaaaattagaaaacagatgctcagatgattgatacttaaaacttttcagatatttacacttacaaactcttagaaaagttaaaattttccattgagtcaaggagcataattctatggaatacatataaaacaattatatataataataaaatccatatgcaaatatttacttggataacgctttgaaccctttttcattctagaaaggttttaatggactttcttagaaaatcaacagtagttctggcatttagatggtcaattaattcataaagttgaagtaatagcatttctcattttaattgaagagaggtacattaagtaatgtgacagtgtcggttattaacgtgacagtgtcagtaagtaacgtgaccatcctctccatcccctgcccaagtattttaaagcaaatttgatacaagagagattgtgtgcttgtttgtgtatggcttttggcttcagtgtacattggtctcataatttttatattcatatagagtacactattgatttggtattgaatgagttcatgagtacagtgtagttatactctttctactccaagctgagaattctattagatactgccagtggagacatttcctataggagtttatagtttagaaggacagtttatgcccttgttgagcaggcagcatattcacaatgaattaatacaatgtttgcatacaaatccttcatagcaagacttctgattttctgtgcccaacattatgtcttttctagtaacatctagaaatttccacgttttttttgaaatgttttcgtttctttataacttcaatctcacatgattataaatgtggcagaatattccaggattcccaaataaactctttttatttttattttagttggtgacaggctcttgctctgttgcccaggctagaatacagtgatgcaatcatagctcagtgcagcctcgaactcctggtctcaaaggatccctggttattgataaaacttctttaaaaaatgtataaatacaccttctatatcccatattagtcatatattatataaaattaggactaattttaaaatagtattattaactttttatacatgtcctgtttcagtcattaagaagacttcctctccccctaattttcacacaagagagctggtcccttgttttctgaatattctttttcatttcctctatatggcattgtctaatatgtctttgttgcctagtatgtgtcagcatttgttataagtaagttatatatgttaactcagaactttggtaagtatcctatgaggtcgattctatttttaatcctcatttcatggatgagaaaaacaagatccagtgaaattaagtaactgaacccatttcacacatctagtaaggggcatcaaatttgaactccggtctctttaacgccagaattctcaccggtcatttctctgcctttctgcctgcctccccctttttgctattatagatgtcgttcttttacctatcactgcattttcattgcctgcattcagttataaagatcaatatgcaaataaatagagcgtattataaatttcagtgttatgaatttgtacaaagctgacttttcttcaccatttaaatttcttttacagtgatatattgcaacattttttggggggcaaaacatagagttttgtgtaatgatcaacaatgactcattaaaacctgtccctagattttaacggatactgcagagcctattggtacttcactgtagttttatcatttaacaaaattaacatatccatattgaaaatcaacttatagtttcattttttcatttgctacgatttgtatggttgacctttctcagggacacaaagtgatttctctctgtgttcccgtctcatttagacaaatgttgaataagactcaatccagcatcagtctatcggtccctttaatttagcatttcttttttgcctgtttaatacctggttcatgttgacgtttcacccttcatggacttctaactgcttgttcaagttcaacatatgctgaaaatatttctcctaaatatctgatcatttagatccatgccacattttttgttattaacataatttaaaaattctgtccagtatattttctaattatctttttattttccagaaatgttaacgttttatcataatacttttttcaaacggagtgctcatacgattgaagtttcatattcttctcttacactttataccaaatgtggtcattttataacaacagttacttaatcgcatcgcttaacaaatattttggtacaatttttgatcactcctcaaaatctaacgatcaaaaacagcatgtcacaattgcttccttaagcattaggaggatattagaatatgtagctcctgtaggccacggacttcttttatacttagatatatggagccatgtatatattctttttacattctattatttccattgtatctcattaaaaatatatcagggaagaaggaggggaaaatagttgacgataatatttgcaaagtttgtctccttcaccgccatcctgagtagcattatgctttgaaattagtgaagttacagttgtgtttcaaatgaattgagggacatggtttggcagcattaatatcattatgacaaatagaacattagactatcagggcagagggaagtgaaagaggataaaataatatagttgttgaattcacatctatattttttttagtctttaaaaaggataaagtgggaggcatgtgcaagttagcaaaaccacaggccttatgtttctagagacgttcttcagactttttaagaacttagcttccctttaactaaattatattaccagaaaattaagtaaaatgaacatttataaaagtagattatcttaggcaacctactcttctaccaaactactcttcgaacttttaggtattttaacctagagaaagaaccttacagtgagtttatgttcttttgagatctctgtaggtacatgagggaacataaaacatttaaatattcagtatttccaaagtataagaaagttatcagtgctaatgtagctatgtttaaaaatgcatgatatcatatgtaatatattttctcttttatattctgtcattaagaaaactatataagctaataaatctaagaaagtctaaattttgtaaactaactttagagagtttgaatattttaacccatagcacagcgtgatgttgccatgctttcatgctatgtatggaataatatgtacttggactggcgttcgtcatatatgaaatgacatagcatattccatggtacatagtaggtactccagaatggtaatggtgataatgatatgcttgtgtttccatttttcccttgataaagttttctgggtttggtattactacagatgattttaaaactttgagatcaacttctacatttataaatttaaaaatgtttcacattagaaagattatttttcctagtacttgtttttcttcctcgcatccatggacaatatgagacagagtctcgctctgtcacccaggctggagtgcagtggcgcgatctccgctcactgcaagctccgcctcccgggttcacgccattctcctgcctcagcctcccgagtagctggaaccccaggcgcccgccaccacgcccggctaattttttgtatttttagtagagacggggtttcaccgtgttagccaggatggtcttgatctcccgatgccgtgatcccccacctcggcctcccaaagtgttggaattataggcatgagccaccgtgcccagccgacaatctgtttatttctaatcttctgtaaatgaaataaagaataatcttggattttttttcctctttttaaaactatgaaaatactatttaaactaatttccaagcccatttttaaaattaaaaatgtaagttagtttggggaagtatatttgagtaatatgtatgatatgtaaaatgtatctgaaaacatccaaaatgttacttgttcatgcagccttccagctcccatcagagctttgagcacttttgtttttatttaagtttttatttaatattttatttacatatattctaattttctacatcttatgtcttattacttgatggcattgatattcattgttgtgacgcaagtctgataattcacattgaataatctgaaatcatatttacacatttatatcttagaaaataattgatctggtttgaaatcattcatgtggtgaatacttttataattaggatgtgttggctttcagatcatttctttcagtctgtgggttcaggggatatatttaattatttttttctttctagagggtgttaatgcagatagcatcaaacaagcctcagaacaactgaacagccggtggatcgaattctgccagttgctaagtgagagacttaactggctggagtatcagaacaacatcatcgctttctataatcagctacaacaattggagcagatgacaactactgctgaaaactggttgaaaatccaacccaccaccccatcagagccaacagcaattaaaagtcagttaaaaatttgtaaggtaagaatctcttctccttccatttggagcataatcaataggtatttcttggcaatttccaagaagacagtaacaaattatttagtaatgaaacgttcaccttctaaggatttagctaagcgcaataaagttcaaaatgtaagcaacagaaatctgtttaaatatgtaagacgtagatacccggattctaaaattgtatttggcgtagttacacagcgctaattgattgtgtcggtttgcgtaagcatgaggcagtttaggagtgtggaaaccacatgtatcctgtaaaaaatggcctctcactttggaactctttctttgtgacgagtgaaacatagtcattttgaaaaagtggaatccatggaaatagttagaaacacgggtcaacaacaagcttggatgcagtataactagatacataaggaaaatatttaaaactgatggacctctcaaattacgataatttgaggaaggtttctttacaaaaagatatttttaaaatgtagctggagtacagaggaaccacaccggatagtgtagtaacccagcatcagagttcttaccccttttagtccagaaaggatcagtgagagagcagttatagaaactcagaaggagacagtcagatcctcatggtaaaagcagcatggccggcttaaggaatcctcatagaaatggagtcagacaaataaacaccccacttcacttttttccctgcctccagaatcttgtcagggctcctcactgactaaacttaatcgtaagacaaaggacaaggaaccgtcatctgtaaatatcagtctcctgggtaacaggagaagagcggacagtggatctggaggggcaaacaagatgtaagtggacaaaagggcctgagaaagagatgaaaggattatgccttcaagtgtaagaaaacaagagctgtataataatgaaaatagcctaaactgttttcattgttactatgagctatgtgcttttcgcggggaatgagaaactgattagaggatggactaaaacgtttccaggatgaacgtttagtgatagatcgagatgattacatttaatacaaaaggcaaggagtggagattcatttgcatactgtaaaaaagaatggcttaaataaaggtagaatagacatggaaaggtgacaaggttgatttagaaaaggtattggacccaaaaagtgatgagaaattcaaagctattttgaagagaaaaacaattgaaggacttaatggttcttcaaatatcggacctgtagcattattaggttttctgttcttgtgttagtttgctgaggaaataaactcagaaagtatacttttggataaagaataccttggataaggcacttgacttgttaggcaaatacacacatctaaggaatttctacattgagatgcattttgtaatttaagaatagaaccaatgccgcttttcctgtgaatcagaggaataatccaaatacattatttcttgccacaaaaatctgatgttaccttatccgattcttgagattcagatatagtagttagtaatagtacctacacagtacattcatgcataaaatatatacattaagtgtctctaatgtgtttaagaatgctactgagtgtattaatcagctgagtctgccacaataaataccacagactcggtggcttaaacaacacaggtttattttctgagagttctagaagtgagagaaagtccaggatcaaggtttggtagggttcagcttcatcttctggtgaaggctgtcttcctggcttgcagataaccaacttctcactctgtcctcacatggctttcctctgtgtgtatacatgcagagagagagaatgagggctatttttctttctctctctctttatctctgcctccttttataaagccaccaatccctaagggattagccccccaccccgccacccttacccaaccctgatgacgtcatataaacatcattacctcttaaaagtcctatcaccaaatagtctcaccaatggttaggacttcaacatgtgaattttggaagacacaattcagcccatagcactaagttttgggaatattagagtgggcattcatggactctgcttttattgtatttacggaaagcagagaagagagatatgaaacaatggaatcaatatttttaaatttcctgctaggaacagtggtttaaactaagatgcaaagctttgggagaatgagtaacagggaaaaacgaacctgatacagccaccaagggcatcttccttgagggaggaacatttgagttgagacttttgtgataagttagaattaggtaagagaacagttaagcaagattccaggcagaaggaacatggcaagagggagcaataaaggccaagcacctgaatgaagaccattgtaaatgctgaacatagaggggcagatgaatgagaggagagacaaacaggaatcagtcaggtatataggagacaaaccaatgacttctgggacctgctagtatcttggtcttgatttgaggaacaaatggagatcaccagaggttttatatattaaatattgtctggaggttgaggaagtcatcctaagggaaaatacttctcttactgcatccaaattccgttgtcacctccttatcaccccttactctttctctcagacccattggtgtctattaatttgaagaatcactttaggtaaaatatttagcaagataagcttaatattattcatacaagggcaaatatatatactgttctgctgagattagtgataggtaaataaattataacatgtttctcagcgttttattttatttggagaagttttataacattagagcgcatatttagctcatattctaatgatcggcagaactggtttttaatattgtgggggttagagagccttatcagaattggaaaaaattcatgaaccctttcctgtgaaaaatacaaaagcttccatgagataagcatataattttaaagaataaacagactcaaaggagataccatactctggaggaccaactaaaccaaatccttttatggaaataatggctaattgttcacatctttttaaacacagaatacttcagttgaaaagtatctcttctatgatttattctcagaacattaaggtctcaactgaacatttgcccaaatgttttattagtttcaaagtcccctttgtttttcagagcacacttggctataatgttggctctttctatagccccctgaacgggaaaaatggcagccctccatctggccaaatataaatcaggttcttaatggttcacagtagatgccaatgctgccatttgtaaatctagcatacaaattatttgtatatatttctgtactataaatacagaatattaccctttacctcttgtcttatttcttatccatggatatataccaactttctagcactggtttgagaggatttatatttgaaagagaaatataggtcaccttccattttgctaaacgtctttaatcttcacccaccaaaacgattgaatcgtcagagattattttacctgaatcagctcataccattataaccacataaacacattcctctgaaagctgtatttatgtttttttaatgagaataagtggcattgtacattagtcttgcaaccatgacagaatttatgtgataaatttctcagcctctcctaatacaaaagttactctctcccaaagagtatgaatgcctccataaatattaactttttttttgccttttcactttgattttcaggaagctcagatttcaattcgttcagaattggtataattctttccattttctctttcttctaatgggctcatgttccaatttttaaatttcaattttcctgttgttacatattaaatagtaactaaccctcaagtatttttttctaaagacagcatatatatgaattgtaagtaagcagccatgataataacacttttaaaaagggcagtgaaaactttgagttcaaattatatatgtattaaatacgaaacaattccaacttcactggaaacaagaacatgaaaacatttatgtagagaatagcatgcccttcgcccactttttgatggggttgtttgtttttttcttgtaaatttttttgagttcgttgtagattctggatattagccctttgtcagatgagtaggttgcaaaaattttctcccattttgtaggttgcctgttcactctgatggtagtttcttttgctgtgcagaagctctttagtttaattagatcccatttgtcaatttgtcttttgttgccattgcttttggtgttttggacatgaagtccttgcccatgcctatgccctgaatggtattgcctaggttttcttctagggtttttatggttttaggtctaacgtttaaatctttaatccatcttgaattgatttttgtataagttgtaaggaagggatccagtttcagctttctacatatggctagccagttttcccagcaccatttattaaatagggaatcctttccccattgcttgtttttgtcaggtttgtcaaagatcagatagttgtaggtatgcggcgttatttctgagggctctgttctgttccattgatctatatctctgttttggtaccagtaccatgctgttttggttactgtagccttgtagtatagtttgaagtcaggtagtgtgatgcctccagctttgtcctgttggcttaggattgacttggcgatgcgggctcttttttggttccatatgaactttaaagtagttttttccaattctgtgaagaaagtcattgtccaaaagaaatacagtgctagccacaaattcaagccacatatgtaatttaaaatggtctagaaactatattaggaaaggaaaaagaaacggtaattgaatttcaatagtacattttatttaacctgattcatcaaaaatattatttgaaagtgtaatcagtatttaaaaactttgagattatgttcttagcttttcttaatcttcagaattaaacatattttggtaatttcatgcatctaaatttggaccagccacatttcaggtgcccagttgccacatgagctagtgacagtacagcagtgttcatgtgattttatcatacaaaccagggtactactgagagtgaaacagggtgctactaataattatgccaggacaacaagaggaaacctggacagccaccgtaatttaaaaagtggcaattggctgggcgcggtggctcacacctgtaatcccagcactttgggaggccaaggtgggtggatcatgaggtcagcagtttgagaccagcctggccaacagtgaaactccatctctactaaaaataaaaaaaatttgctggacacggtagcgggcacctgtaatcccagctactcaggaggctgaggcagaagaatcgcttgaacctggaatgtgaaggttgcatttggccaagatcgcgtcattgcactccagcctgggcaacaagagcgagactctgtcccaaaaaaaaaaaaaaaaaaaaaaaaaagcagtggttgcctgtttggtcaggagaagtaatgagaccatacaaaacatagaagattatagatatatttttatatttgggtgtgtacatacatatgtataagtattatatagattttatatgtgtgtatataatctatataattgtatcaaaatatatttataattatagtatacacatatacatatatgtaggtatatatgtaatttatattttgcagaaatgaaagagaaaatattgttcattgagtgagcttaaaatttgaagcaagcgcacatcattttgatataagaggggtgcagccaaacacctatatttgatttatggaaaggatttaaggtcatgcatagtatttttccactgtacgcattcatacccattaatgctctaaattatgtcatcttgaaatttaaatatcattatataggatgatacatattgaacaaagagccaaggtatccttaaatgtatggctggtgatagaggcttgtctatactgtcatggatgtttcttatcagatatttgtgaagggtattaagctaaacttgccttactgctttttaataccttcttttgcaaaatgtaatgtatgcaaagtaaacgtgttacttactttccatactctatggcacaggatgaagtcaaccggctatcagatcttcaacctcaaattgaacgattaaaaattcaaagcatagccctgaaagagaaaggacaaggacccatgttcctggatgcagactttgtggcctttacaaatcattttaagcaagtcttttctgatgtgcaggccagagagaaagagctacagacaagtaagtaaaaagcctaaaatggctaacttgacattttccaaaatggttatttgtggggaaatccagaaggtactaacatgaaacaataatttctgtaaatggaaccattctccctacaacctgtattaacaaggaacgaaatactggtgtaacagataagctgtctgtagatttttttgtcctcataataattttgtgactttgagaaacaaaacatgttttgtatgggaatagcttctccttgggggattgtagatttcaaaatcagatgttttgaatatagaagaaaataaaagagcagttgaggtcatatgaatacacttcaattaagtctggctcgctgtatatacaaggatatttgctaggcatcttctaatatttctgtcaatttatctgaagagtattatagctttagcatacatgtggcaactgaaactcagcaaaggacaaattattctttgggctacattttactactggatcactataattacataaatcctattttttcctttgatgataaaagataaaagtggagcaattatgcaaattcatgccatgcgactagcaaatttttcaagatgtttcttttgtctcttcctgaattgctttaataagatgatgttaatacatagtatctgctccaaaatatctctactcatcaacttagttttaagacaaaaattcttttcagagacagatgaatgaccacctttaagaaatagtaaatggggttttgattcactatatacatgcatatatgtgttcatgtgcacacaaaaggaattattgagtaaaatcgggtttgaaggcattaagataaaagtatttttctgaaaaaatctctgtcccaaatttgtcatgagaagcacaggaacatgtgtttgtttactactaaaacttaaattagttggaaaatatattatcctattgcttttctttgtaaatatttaaagaattcaccatataatatcatttccagaattaatgtagtgatacacaacgcttttctcatttcccagcttttcattttttacaaaaatgaaatgagctaaataaagcaaaggataaatactttttttttttttttttttttttgtacttcagagtcgtttttgctaaggggtttattttcctgtacaggtagtaaaactttataaatagtatcagctccctctagtggatttcagtatacttgttactgtgcctctgcaaaatcaatttgggaaaatattttaaatgtcctagattttcaaatattgacatatttaacaataatgtattttcacttgtcattacatacataactcccccttaaagttaaatacatttagtggctatgcagcaattgttgtgcaaaggagccatttcactggaaatttactttaatctgtatatacctcttaatcatattaaagttcaactttttatcatttactttaaagatgttcagaatagcaatgtttgataactgagatttgtctatgatgttacaatataaatacgtaataatatatagtctctattcatacagctctccatccatccatccatccctatcatctttcttctcttttttaaatttcatacctacaaacgatgattgtttataaaacttcctaactttttcactgctattatatgtaaacaaattgtccccacttccactgtagctacacatctttaattttactattcacccttttggaatgcttgtctagattaataaataaccctttaattaaatatggtgtatatatatatatatatatggaatgaaaaatgtagcatatgaaattacatagcagttgattttgttaatttgaaattaattcaaataattgcacatgtgtatgcattatatccgaactggcaccagggagtaaatctcatttcttgtattcctccacagtactttggacgtattaagtatgcaggaaataagagctaacagaagtgcctaggcatccatactgacttttatttcctctttacttttttaaacttgctttttcacacaaaaacctggcttttaaaatatactatcagtgttggaaaatggcataaggaattggtagttgttacctgacataagtgatagaagaaaataatataaaaagataaaattctattttcaaagcactttttactctatgcataactaatttatacatcattttacctaaccctcagagagaaacacattgagtatttgttattacaactatatcacaagtaagctaatggggtttgaataactaaaagcatggatatgggatgctgtaagaactagatcgtatacacgaatgtccataacaacattattcataatagccaaaacgtagaagaaacccacatgtccatccagtgatgactatatgaagaaaatgggcacatccatacaaggcagtgttactgagcaataaaaagggagaaagtactgatacatgctacagcatggagtacccttgaagacattatgctgagtgaaagaagccagtcacaaaagatcatatgttatatgagtctcttgatataaaatggccacaataggcaaatctgtacaggcagaaataagattagtggttgcctaggtctgggaggatgagggggtggaattgtttcccatgacagttgataaaatacttttctagagactgaaaaccagtaaactcatgttatatgctagatgaatatagaaacacagcatctagtctgttgtagataattgtttcaacaaagaaaaaaatgaaaccttatttcttaatgtaaagaaggaaaaagattggtcatataatttgagtttatttcattaacaatttggaaatcatgttaaaataattattagggattttattggtttggtttagttttgcaaaaatggagaaagtgacattattagttatgacaaagccagtgttttgactgttctaaagtttcaaaatgattctcttctgttctacaccattagattgctttcagaacagagtcttgctcactttttcactaataaattcaagaaatatttttgaacacctggtatatgccgtaaaagtgctgggcactaggtaatatacatggtggagaaaatcaagagcaatatgtcttcatggagcttattgaaagaaagataataaaattgaatatctgaatattattgcagattataattactttggcgtctgaaaccgtgattctggggagatgatgttagaaccaaacctggagaatgtgcaggtgccagctatatgataagttggagaaaggacattaggagaaatgaaaagaaacacaaattgccaaaggtgaagaatgagggcttggcatgtccagaagacataagggaggccagaaaggctggaatgtaacaaatcaatgaaagattaggacaagatgagggtagaattgctcttatagaacttctataacaggtttggattttaagagcagtagacatttccgaaagaatttcaattgaggaaattaagtacccttagttgtattttttcaaaactcaccctctagctggtatgtgaagaagaaatgcaatacaagtctgaggagaagcaggaagacttgtggaaagaatagccacacagaggagagtccattgaaccttaaactacagttgtgataagataaagaaaaatcatttcaacccttgaagaggtgatgatctggggaggtgtagcacagaagatattcttgccagaattgaaagaaaataacttttacctcttacagagacagtagaagaaaattttaagggtagccagcaaggatgctctccatggccacaatttcaagctctatggttagtctctacccctccctgttaggatgctgagactgggaattaaaacaaagtttgatgtgaggtaactcttctagctgcagttcaggaaattgacctaatttactttattaaaattttaaattttttattttaaaattttatttttaatacatctaggcaaaggaatgttttgttccagtagacacataatctgttgcattgctccttcactccagaaactaggtaaactgtttgtaaatgttccttttaaaaattgtgttatttttatcaataccatcaagagcaagcatagcagacatgtttatttaagcaagctatgtgcttattgtgagataaaagaattgttccctgacctcaagaatcatgggaaaactcgctaaatgccaagttaaagctatacatatatatatacacacgctgtgtgtacatatacgtatatgtacacaagttgtgtgtgcatatacgtatgtacatatatacacatactgtgtatgtacacacacagacacatactgtgtaaatactcacgtaggcaaatattgtgtatatacacacgtagacacatactgtgtatatacacacgtagacacattctgtgtatataaacacgtagacacatactgtgtatgtacacacgtagacacatactgtgtatgtacacacatagacacatactgtgtatatacacatgtagacatatacacacacacacacacacacacacacatttataaaatttatgtgacaggaacctcatactattttccaaaatggctgtactaatttacattcccaccaacaatgtgtaagtgtacttttctccacagcctctccaacatttatctttcatcattttgaaagtagccgttctaattttaacatgtgtaaggtgacacatcattgtggttttcacatttttctgatgtttagagatgttgagcattttttcacatatctgttggccattggtgcctcttattgcgagaaatgtctgttcatatcccttgcccatttttaaatcaggttatttgttttcttgctgttgagttttttgaggtttctatatattttggatattaactccttaccagatatttggtttgcaaatattttctcttgatctgtgagctgcctcttcactctgttaatagtttcctttcctgtgcaggagctttttagtttgatgcaatctaatttgtctatttttgcttttgttgcccatgccatatccatttgagcattattcataacagccaagatacggaaacaacctaaatgtctattacaggacgaatggataaagaaaatgtgatatatatagtgatatatgcatagtggtagatatatatagtgatttatatatactgatatatagagatatatatactgatatatatagtgacatatatatatagtgataaatatattccagtgtctatatatgatatatatatgcaatggaatactatacagtctttaaaaggaaggaatttctgtcatttgccaccatgtagatagaactggcggacattaggctagctgaaatgagccaggcaaagaaagacaaatactgtatgatctcacttatatgagaaatccaaaaaaaagtcaaattatagaaacagaaaatagaaaggtagttaccagagactggggggaagaggaaggttgggaaagggaaggtgttgatcaaatgatagaaagtttcagttagactggaggaataaattgtagcgatctctagtactgcgtggtggacacagttaataaaaatctatgtttcaaaattggtaaaagaatagattttaatatccgcatcacaaaaaaagataagttggtgaggtgattaatatgttaattaacctgagtgaatattttacaatgcatacatagatcaaaacatcacatgataccccataaatacacataattattatttgttagttaaatatgaaatagtttaacatgatattttgaaaataggattgctaagtggatagagctgcttttagaaaaagggaaaattcagcaaaagaaaaaaactcttaaattctaataaatatttctgtagtgtggtagtttatacttacacaaagttggtcagaaaaatgagacttacctggaaaataaatcagttgtccaggaggtgaataatagagcagtatttatgaaaatgaccccaatttcagttggttcattggagttttatgacttataaaacaaattctatggtgatcttagataaaattcctataaacccatctatttcactcatgtcagaccacaccaagtgccctttgtgagaatggagcctgagcagcagcgactttcagcagagcaagttgcataagcaaaaaggcgtgaagtaattaaaaggcatattttgactggaggatagaatattgattttgataggaaattgggctaaaatgttgattgaattcccaatcacaaagatccttgtatttcaaactaaggaaacaacttatatattgacattagaaattcaagttatactcagacttccttgcacttgtaattatctgaaggaccattcctagtatgttaatcatcatatatcatgcatgggtcctgttgtatttcttgacacctttgtcagtgttcacattttagagaaatgcttacttttgtcatggtctatgttatttaataaagtttggagcctttgctgattgcattatctccttgactttagattgatcatggggaatgaggaaaaaggtgggatctggttggcatggaattaaaggctcaagttgagcattttgccgaagtaggtatatgtcattagttcagcttcttcacacatgtgcagtgcatttttttccccacaggtaataatggggaattcaaattggactcgatttcatattcacaacaggacttctaatgtttttaaatgctgtcaatattaagactactaacatatcatctctttctccccctaaatggattacatgggtgccttttccagcttctatctaagcactatccaacagaaaaataatgtgagccatatatttaattttaaatgttctagaaaccacattaacagatcaacaggtaaaagtcatttgaaaatattgtttcatcttagaattaaaattttaaaatgtggaaatagctttacattctttttgtatgaactgtccaatatctggtgtgtctttatatatacaaaacatctcaactcaaactggccacgtttcaagtgcttaacggacgggtagccagttgctaccttattggttggcacagttacgtcttccttctctctattgtacattctctgatgcttaagtgcctattttctgagtagttctatttttcaagaggagagattttttttttcagtaaagtgttatatataaccgattgctctggtatctctttatctcgatagttatgtctctcagaattttcaatatacttctctgtttactttgctttccagttaaagtggtttgcccttgacatagactcatgtgtattagaaaatgtagcatctaatttcatacttagctcttttgttatcacaaaagaatcttgctttgcctctcttggtctgtcctttgctctccttttttctctcttcttttccctttagcccctccctcttttaagagttaaagacaagcagtttttaaacaaaaggtgcagaaaacttcttttttgtattcctttactataattttagatgtcagtttgcctatactttatcacttccatccctcacatggctatattaaatgtctagatattaatggaatttttttttttacttttcaagataaacagtagtgcaggataggagcccttaatttttattttcccaataatttacagcacgtgcttccaagcttgcaatcacttatattgattttcattttgttgaatatatttcactaataaaaccaaaaagatatctgcatttttaaagtggtcctttagcagccgaatagtagaaactgtcataggaatactttctttagagaaaaaagttacatatttataagcaatatattggctaaacgttaaatcttcaggccatatttttcctgagtctgtgctgagtctaatgatgtcagtagaactctcgaggtcttttaagatggtaggttattagattggatatgtttattgtcttattgctgtcagtaaagataaacttatctgttggattattaatctctatttctacataaaaggaaaaaaagtgagtttccgtagatggagctggtctatttctgctcctatgttgggatcacaagggcagcatctacagatatctcaccagctagtaggtggggcagctcatactgtgtttgcccttgggtacattagcttctgtataagactttttctttcttcttatctgaaacagatttagaattcttcactggcattccctggcctgcatggtttaaatgagatactctataccgttgcaaatttgtcaagcatttcctgaaccttgatagcaattactgctgtcattacatagtgtcattacattccacataagaaaatcagaaaaagaaattgtgatatttatgttagtaggtgtgtatttttttttccagcttgcctcacaaactatattagatggacaagttcccaaaccaatctttggaagtttatttcttaaagctacaaaagaatttccaagagattagattttttgaaatgaccagtttcaaatgaatttaatacaaaactaggatgagggttggaatgcaaggaggaattaaaatatgcatgttttaattatagtttaccaatatgaagtgattcctgtgagattcagttgttggacagatcagaagttatacagaaaaagatcaataattcagagactgaagtgtttcagttttcattaaacagaaagaccagaaagaagttaaagaggagacatgttcaagttcaattaaaccaaattttatgaagcttatgattcatccaacataccgccatgtgtctgcccatagtcccctctccttctagatcatttgctgaaatgacatctcagacacaatcatttgcttcattgtaactaaatacctctttacttcactgctatttataaggtcccttttggattttgtttattaataatcatctagaattcaaataaatgcatatgccactcttgccactcctcttcagcatagtactagaagtcctagccagagcagtcagacaagagaaagaaataaagggcatccaaatcggtaaagaggaagtcaaactgtcagtgtttgccgactatatgatcatttaccttcaaaaccctaaggattcctccagaaagtttctagaactgataaaataattcagcaacatttccagatacaagattaatgtacaaaaatcagtagctcttctgtataccaacaacgaccaagcagagaatcaaattaagaactcaaccccttttacaatagctgcaaaaaataaaataaaataacaacaacaacaacaaaaaacttaggaatatacctaaccaaggagtcgaaagacctctccaaggaaaactaccaaacactgctgaaagaaatcatagatgacacaaacaaatgaaaacacatcccatagtcgtggatgggtacaatcagtattgtgaaaatgaccatactgccaaaggcaatctacaaattcagtgcaatccccatcaaaataacagcatcattcttcacagaattagaaaaaaaattctaaaattaatatggaaccaaaaaggagcctgcacagccaaagcaagactaagcaaaaagaacaaatctggaggcatcacactacctgatttcaaactatactataaggccatagtcaccaaaacagcatggtactggtataaatataggcacatagaccaacagaacagaatagagaacccagaaataaaccaaaatacttacacaaactgatcttcaacaaagcaaacaaaaacatacagtaaagaaaggacacccttttcatcaaatggtgctgggataattggctagccacatgtgggagactgaaattggctcctcatctctcacattatacaaaaaccaactaaagatggtttaaagacttaaacctaagacctgaaactataaaaattctagaagataacattggaaaaaactttctagacattggcttaggcaaggatttcatgaccaggaacccaaaagcaaatgtaataaaaacaaagataaatagctggtacctaatttaaattaaaaagcttttgcacagcaaaaggaacaatcagcacagcaaacaggcaacccatggagtgggataaaatcttcacaatctatacatctgacaaaggactaatatccagaatctacaacaaactcaaatcagtaagaaaaatacaatcccatcaaaaagtgggctaaggacatgaatagacagttctcaaaaggagatatacaaatggtcaacaaacttatgaaaaaatgctaacattatgaatgatcagggaaatgcaaatcaaaaccaccatgtgataccaccttactcttgcaagaatgaccataatcaaaaaaattttaaaaagtacatgtttgcgtggatgtggtgatcaggtaacacttctacactgctgatggggatttaaacaagtacagccactatggaaaagagtgtggagattccttaactaaaagtagaactaccactcgatccagcaatcccattactgggtatctacccagaggaaaaaaagtcattattcaaaaaagatacttgcacatgcatgtttatagcagcacagttcacaccagcacaatcgtggaaccaatccaaatgcccatcactgaatgagtggttaaagaaactgtggtgagtgtgtgtgtgtgtgtgtgtgtgtgtgtatgtatgtatgtatatatgatggaatactactcagtcataaaaatgaatgaattaacagcatttgcagtgacctgaatgagattggagactattattctaagtgaagtaactcaggaatggaaaaccaaacattgtatgttctcactgatatgtgggagataatctatgaggacacacaggcattagaatgatataatggactttgggaacttgtggggaaggttggggggagagagaaaagactacaaatagggtacagtgtatactgcttaggtgatgggtgcaccaaaatctcacaaatcaccactaaagaacttactcatgtaaccaaataccacctttacccccaataacttatggaaaaataaaaaataaatgcatcaggttaatagagaaacatattatttatgtaaattaaaacagattttaagtactacaaatatcttttaataagaaatcagaagtgctcagattaaatataatctcttaacatttttatgagttcccaaataaatgcaatataaacatattgaaaaaaattatccatttctaacatttcagcatccattgccaacacactctctaagattatcgcaaccatctgaatactacattaaatacatgcaaaatactttcctatattcttctcatttagtgtagaaggaattggtatattgaaatgacattcatatcccagcaattaaaataatatgatttagataatgttatttgatgtggtgatataaaccaggactttgcagtgtgatttcatgtatttagaaacattattagccattatctgtttaaatatggcttctgccacattctgggatgcatatatattagaccgttttactgtgttctctatctttttgtgtctccatgcttcattccaggtatttccttctgaatcttaagatttagtaattttctatttacccctgtcaaatttgctgttaaacccatgcacttaattcttatttttcacttactgtatttttaattctagaatttcttttggattatccctaaaatatgttatgtcctttttatggtttacagttctctgcagcgttctcaatcttgtgtctaatctctttcaatatagtccatgtggctgcttaagtcacatttcatatatatacatatacacatacatactttaaaacgtataaacttgtttgtatatacatactgtatatctctatataatactttccctaatataattatacatataaaagtatatacatacacatatgcctctttaatagcctgttttctcaattgcaattgggattaacaatgtatatgtctcacaggtttattataagaattaagaatgataatatttatggggttattactagagttcttgatacatatactaagcatgcgtacatgggtgttctttcagtaaaattagacatgacatgatataatttaaaaatcaaggtcttcggataatgatactattttttttccaaggcaaatgataacactgagagagagtagcctttcagtatcagatacaattggaccctgctcggtttctgcaaataccatctgtatcaccttgggcaatttacttagcttctctgtttttctgtttcctgcccttatctgtttttctgtttcctgaccttataaaacgaattgaacaatatagattttacaggctgatttgtgaatttaatgtaatatgtgtaaggtccctggcatattacacatgtagcaggaatgtatcttcataatcatattaaatatatttttcagattttctaattttgttaatatttgaaactagtaatataattgagtttgctgacaatttaggaaaacatggcaaagtgtgaaacaattaagtgattctcattcttttttcccttttgataaagtttttgacactttgccaccaatgcgctatcaggagaccatgagtgccatcaggacatgggtccagcagtcagaaaccaaactctccatacctcaacttagtgtcaccgactatgaaatcatggagcagagactcggggaattgcaggtctgtgaatatttgaatgtcaaaacaataaagcacgcttatcaagcattcacattgatataacctttaaataatattagaatttaagtcattctgacaagtatggtagtttgcccattgagcaaatgaaaatgagactttacagtattatttatgcatatactctatctatggatatatatgtatgggcatatatacatgctgtttttgaaaacaattgtatgatctatttatgaagtatatttttaatttagcatgcattttcagatgtattgattttgattattagaaaaaccattgttttattccccacctttgcttctttatttgtaactcctgtcacattctcaaactggtgggtaaaatcagtgtacagtcatcccttcgtatccatggggaagtggttccaggaactcctatgaatatcagaattcacagatgttcaagtcctttatatgaatggtgtaatatttgcatataacttatgaacatgctcccatatactttaactcatctctggattacttataatgcctaatacaatgtaaatattatgaaaatatgtgttatactgtattatttaggaagtagtgacaatgaaaaagtcttacatgtttagtacagatgtagttatttttgtcaaatattatctattagtagttgactgaatccactcattcagaatccacaaatatggagggctggctatatttataaaattggtttaaatttaaacattaattttctgtaatgtaatgagacatttgaattctaatagctacatttttttaacatccttctatcaggaaagatatactaatatgggaaatgaaagaaataatttgtaagagattttataatacttttcctactttattttatttttagacggagtttcattcttgttgcccaggctggagtgcagcagtgctatctcggctcactgcaacctacgcctcccgggttcaagtgattctcctgccttagcctcctgagtagctgggattatagtgcgtgccatcacgcctggctaatttttgtatttttaaagtaaagatggggtttcaccatcttggccatgctggtctcaaactcctgacctcagatgatctgcctgcctcagcctcccaaagtgctgggattacaggtgtgagccactgcgcccagcccttttcctacttattataaaatactacattatatgttcaataactttttatttctgaagacatgaaaacgtattagttatatttagaagctgagataatatgtgcattttaagaaaaatgtttaaaaattcaaatttaaactttatcacatagaattttttttggataattaaatatttttttgaagtaatgtattcaaagaaaaatacatttaaacaactttcattatgtattgtcctatttagatatttattctactacaataccaaatggtagctgtttcaccttttttgtttccttttgttgtggtttttaatgcttggcataatgattccaaagtctatctggaaaaatgtgttgcctaatagaactagtaaacttttaaacataagaataaaaatgtgcaagaataagagtggagaaaacacaagaaaaggcagttagatgagcagaagagactatttccactgaaaaagataggaaagaaaataattgttcataaatattattgggaaatgtattaactaactaaaaaaaaagatatgaacatttcccccaaagttacaccaaaataaaaaccacatacaataaaatgttcaaaaaatgtggggaagcccaaattttggaaaatatttaaaataataatgttataaaaatttaggtggagaagcataaaaatcgatggaaacaatcacaaacattgtaaaaacaccagagacaattttaaagaaatatgataccaaggaatctttttttttctgtgagtaaggaagaaagtcttgagtaaggtatcctccaaaaagagacatatatgaataataaacctatgaataattgtaacttaaattgtaaaggaagaagtaaaaaaattacaagatgagaattttttttgcatactaaattgcatacacacaaaagatataagtaccaatttgcaagtggtgaaataaaaattgtctcttactgctggaaatgtaaattcaatatgaattttactgaggttaactcttcagtgcatcctaataacatacaacattaatataatttccatgaaatctgtatctgatggaaataatcagaatacactcaaagatgtaaatggaactggagatagataggatattgattgattgagggatggatggatggattagataggtaggtagatagagataaacataatttacaggagtggaaaactagaaatgaatgtgtagaactaataatggaaattgttgaactagaaaagccattacaatttttgtttttgaaaaaataattatttgacatgggcaaatgctcacactaaaacacctagctcaaagtgtagttatatgctagatattgtctaaataatcagtcataggggaacaatttgaaaaagtgaaataaacttaaaaaagtaaagtaaaaaaacaaattaagtaccaccaaataggcataggatactatgaaactataaaacttagatatttgacaaattttgggttgatataggtcacattataggggaaagaataactgtttatatgtgcatacatgatcatatatttaatatttagctatacatagaacaaattgaaaatttatataaagtactagtagttctggtttttttttccatttttgtcatgagcctttattattttataaagtaaaagtaacattaaagtaaatattgaacaggggaagtctaaagttatgatcctactgtaagaaattacatgtgttatacagaataagtataaataaattttataaattctccacaaaactatccttgaatcccaccataatactacataacagaataacattttttgaaaatatattaagtacatagattgttcaataagtttttctattccatatatcaatattattagctatagttttatgtagagtttactttcctgaaagctcagtataattaatttcaactccattaactgtatcacaaatgcagttattaatatatatacttaattcagtaaaattagatgcaccaaaactttttggctctgtaagatatagttttgagatatatttgacattgttcagaaaaatacatatggagtgttaaataccactaaataatattcaagttactcttaggataatatgtaaaatttaaattaccactagaagtttataactgatagaagatcatctactttgtttacatgtttgaatcatatagatttcaagtacagttaatttcactaaaactcatcaattattattcatcaattagggtaaatgtatttaaaaaattgttttttaggctttacaaagttctctgcaagagcaacaaagtggcctatactatctcagcaccactgtgaaagagatgtcgaagaaagcgccctctgaaattagccggaaatatcaatcagaatttgaagaaattgagggacgctggaagaagctctcctcccagctggttgagcattgtcaaaagctagaggagcaaatgaataaactccgaaaaattcaggtaattcaagattttactttctaccctcatttttatttacttgttttttccctaacgatacactgtaaactgtaaaggtacataagcatttgaccttcagcatctttcaaagttagtgagaagatgaaaagacatgagtcttttacaaaggatggcgatttgcttattccttctaggaaaagaataggagttttctcagtgtttttagaatgaattttctattttcaccattaccaataggaattaaacatgtttttagtttaataattttcaaaaccaatcatccatttagtctggttgtcttttaagatacgggtaatcatttagcttatgactagaaaaaagttatgtatatatacattatacagaggtatattgtaatcattttatatatataatgtatagtatgtatatgattatttcctatattacctttcatttctgctgttttgctacttataaaaagtaggagtcaactatgctgtctatatgtgctattatatataaaatatggtgatatgttcataaaattgcattatatattcatcccattatgtataactccatatatgtatatgtgcagtagaaatgtaggtgtattaatgtcctatgatactcctaagaaattagcagaaatttaatggcttcaaacaacacaaatttattacattactgttctggaggtcagaagttcagaattaatctctgtgggctaaaattaaggtgttagcagaactgtgtctgttttggagactttgaaagagaatgtgtgttattggcatttttagcttccatatatatatgtatatatatacacacacatacatataacatgtatatatgtgtgtatatatatatatatatacgtgtataatggaattatatatcatgtacatatatacatatctaatgtaatatatatcacatatgtaacctgttgtatatgtatattaatgttacatatgtaatatatagtaataacttattttatcaccatatcgaatttgtaattatatgcttaaattttaccacatcaccttcttcctgaaaccaaattcccttgacttaatttgtttgaatagtgccaccatactaataaccactcaagctaaagaaaaacagtaaaccaacaattgcattaaggtctaaaagcctaaaatattcaataaggtaagtaatgtgtcccttgagtggtcaattattgtgacaaatgttaatgctgggaaggaaatgtcgaaaacgttatggtatgatggaaaaacattgcaacaatatgctcctggatttaaatcccagtctagctgcttagtttttgtgcttaccttttacaaaccaaagcactaagcaaacctaaaacattttttaatgcatagcatttctttacttataaacatatgtgtacatgcatacctatgtaaatactgcatgaaaatatctattatttgtcaagaccagtggcctaagagggcacaattacatggctcttgttatcaaggagcccacattctagtgaaggaggaaggtaggtgtattcatttcctatggcactcctaacaaattgccggaaatttaataacttcaagcaacacaaatttattagagttctggaagtcaaaagttcaggattagtctcagtgggctaaaattaaggtgtcagcaggactttgtctgttttggaggctttgcgacagagtctgttttattggcatttttagcttctagaagcattccttgtctcatgtccccatcctccatcttcaaagtcagcagtgtaacatcatctagtgtcaatttctctctccctgtctatctccctctccctctctttctacctctccttctcaccttcctttccctatcctgttccctgtgttgacttccttttaattaggacctttgtgattacattatgccctggtggatgatccagtataatctccccatctcagaatccttaatgtaatcacatctgcaaagtcctttctggtaatatactcacaggtttcagagattagggtgaggacatcttgggggtagcattattcagccttgcatggtaaataaattaaacagtatgggaaaggttgtcacagtaggcaggaaggaaatccaacataaactaggaaaaaggattatgaaatattatcggaacataggttgtctctgctatagattaaataggtagaatttagttagctaataccgagaaagaaagagttcttgagaaagcatagcagcattttcagttaaatgatataagttcaacactgggtagacaatatatatggggattaataaaatattatggttggaaaactggattgagagtagacagtgaatgtccttggatgctatgttttacaatctgagttttaatctagtggtgatgggactgataataataacaataaaaacttaataagaaaaaactgctattggttaaagagggaaataatatgattccacttgtgttttcaaaacattcccaagatgagaggaaggaggagaggagattactggcatcactgtagatcagtaattagaatgaggtgagaccgaggcagatatcaaaacgagccagtgcattaatggagtcactaatgagacctgaacagcccaggcgtagtggctcatgcctataatcccagcactctgggcagctgaggcaggtagatcacgaggtcaagagatcaagaccatgctggccaacatggcgaaaccctgtctctactaaaaacacaaaaattagctgggcatggtagtgcacgcctgtaatcccagctacttgggaggctgaggcaggagaatggcgtgaacctgggaggtggaggctgcagtgagccaagattgtgccacttcactccagcctgggcgacagagcaagactccatctcaaaaaaaaaaaaaaaaaaaaacaaaaaacaaacaaaaaaaaaaagacctgaacaaggacagtgaagatgtgaaataagaacaaatgtagacttgaaagataacagcaaggtgatcgtcttgaagttctcttagataaatagtttaaaaattattattaataatcacattaaaggggaaactttctgtggagcacatattttcaatgtaaatttaagtaaaacagaagaaaataacacatgtagacagcatagttgaatcatactttttagaagtggcaaaacagcagaaaaaaaggtaatacgggaaagaatcatgggtgagagatactggctatttataaatgataaaagatgatgatttttacctgatcattacttcgtactggtcagacaaataaaagcaaaagctctgtctttgaagatgacaaaatattagtccaaaagttcccaactggaaggactatttaaactgtcatctgtagaaaataatttgtgaaagttcgggtttagggaggctataaagacaccattacattgagtttattgttcatagtttgttttatgtactgtaaggacacatttttagtattctcatgagttgttttgtaacttaaaatttctctagagggggatatgatttaatgttctcgagagtaacatcataaaaccacatttggtagtaattttgtatttttaacaatagcagacttcacacaccagtgctcatacagtagaccataaaaatgcagtcttagtaaaaatattctttgcctcaagaactacttagagacatcctttaaacatgggaattgtttttgggcctgtgtttagacataacacaatgatgaattgtgttaaaagtaatcagcacaccagtaatgccttataacgggtctcgtttcagaatcacatacaaaccctgaagaaatggatggctgaagttgatgtttttctgaaggaggaatggcctgcccttggggattcagaaattctaaaaaagcagctgaaacagtgcagagtaagatttttatatgatgcctttaatatgaataattttgtatgaatattatttggttagatcagtgttttacagctggggtggattttgctctcctctccccagtggattttttttaatgtttctagacgtttttgattgtcacagctgggttgggggtggtggttagatgctactggtgtctaataggtagaggagagagatgctgctaaatatcgtacagtccatagaacattcctccagaacaaggaactgcacaatctaaaatgtcactagtgccaatgttgagaaaccctgggttgagtaaatgaggaactgacaaaacattgccttgtactcaacctcatttgataacattattttactataaaatgcagtataatttaaaggtaaagaatcctttgagctacttgttatttcttatgataaattactattcatactgtgttgttctcttcatctataatgcactgtactataatataacacagtatgcattttgaaataatattcattataccattgtcatgcagcaggaagaaaacaatcttgctctttaaggaaatttttttacaatacaagctaaaaaagcaaatccacctcacaaataaccttcacacccattacactgtaaacaatttctgcagtatcctgtgtttgaaaatgaaaatactaacaaagataataaagtatgaagcccatcattttcacacatttttctaaccagaaatattaaatttatttccttttgtttctgatataagtagaatacaaataattccccactggattcatgccataataaccattgaacatttttgcaagactgttaggcagtcatctatatcaatatctctgtatctcagattttaaaagacaaaaatccatatgcaatgccatcagtcccaattttacattttctagctatgtttcatatctaatatgtggcagtaatttttttcagctggcttaaattgatttattttcttagcttttagtcagtgatattcagacaattcagcccagtctaaacagtgtcaatgaaggtgggcagaagataaagaatgaagcagagccagagtttgcttcgagacttgagacagaactcaaagaacttaacactcagtgggatcacatgtgccaacaggtatagacaatctctttcactgtggcttgcctcaacgtacttaactaagatttcctaatgtctcccttcaccgttacttttggttaaggctttgttcctatgtttttgctttaaagcacaattaattctgacaaattaatcttttttctagcatatctaaatattttcatggtatatattttaaatagtacacattcatcttattttgatcctaaaatgactttcttgaacacaactgtcatactaaaaaatgaaatcctattcttagtcattatttccaatccatgttttcttcagaacataaatgtataataataatgggattaagaaaaatttgttacacggagatatttggtacaaaataaaatgcatggctaatatatgtgtatgtagaaataggataaataattataactttcgattaacatttccaagtttggcctcttcgacacatttattatttatttattttattttttgggacagggtctccctctgtcacccaggctggagtgcagtggtgtgaactcggctcactgcagcctcaacctcctgggctcaagcaattctcccatctcagtccccacaagtagctagaagtacaggtgtgtgccaccatgcctggctaattttttgttattttttggtagagacagggtcttgctgtgtttcccaggctggttttgaattcctgggctcaaacaatgctctttccttggcctcccaaaatgctggaattataggtgtgagttaccacacctggctgacatctagttttaaataacaattaagattcagtaaccattaagaatagctgaatttcaaaaaaaaacacacacaaaatgactgtacactcatatttgagtttctcatttttctacagaagaatattttatagatatctctcttatatttaaatattcaattacggatagtaagatatattcaaaaatagtgtatatcaaatacttcttgttcgaaagataaaattttgaactaaagcaatgaatacttttaagttcaccaatacattagtccccgatcatctgcagttttgctttccctggtttcaaatgcttgtggtcaattggaatcctaaaatcggtgagcacagtaaaataagatattttgagagggagaagaagagagataacttgttctattttattagttgttaatctcttactatgcctaatttataaattaaattttataggtatgtatgagtaggaaaaaatctagtgtatatagggttaggtatcatctatggtttcaggcatctattggaggtcttggtatgaacatatcttccaaagatacaagggaactactgtacctttttggaaattaataaggggtttcaatttacgtgttagaggcagttggtctttggttactgctaagtaaactttcaaaatagaaaagaagtaatgtcaaaaggcaaaagctacatttgaaaatgaaaaaaaaaattagaaaagtcaagggaaatcactcagctaatacaatcactgacaagtgttcattggttctgttaattcacagatgagctgtccctgggtcagctagctcacattcttctcctgaagtaagtcagtgctagaagagttgtttaggaaaaaaaaaaaatattacttaaataatagattataccattgatgttttcctggaaggccagtgtgaaaggtatttgttttttgtttgttgaatgttcttaatggatgaataaaaagaacatcaccaatttatgtagagcaaggggaaaacatcagccaaaaaaaaaaagtataaaaccaacaatattactaaaacctcaaggtttttacattttacaggagtacaatttgtaaaggctctctaaaaatgtctttgcttaagaccttatgtctgttatatgtactaagaatttgttgttcaagagatatattttaaacacactcatctgttgcatagcaaaaaagctatagatccaagctatgttctgatctccattttctaatcttagaatattatatgtatctgtgcttttcctacaagtatcactctggccatgttctgactttgtagccaaatgagttaggttgtaaaaggaaggaacaatggcgctcaaggagaagaagaagacgatgcggtaaaaacaaggaagccatatgtgaatattgttaccaattcagcattccagagagaataatggaaatgaagtgtaaatctatgcattacagaaatatctacagacaaaataagtgtgtgatacactcttttgggttaaagataattccttttttgtcaccagatgccaatgtctgcgaaaacataaataatttgaaacaaaattgtccaaatatctgatacatttgaagatgctttcacatcccatgatctaattttgggtatataaaatggttattattttaaattttaaagggtatgtatataagtttaaaaatctagattctagctatttctaaaaaaatgatcagatataagtgagggaataaaatagacattgtagttaccttcacggagataatagtttagtggtgaaaatggaaagtaaataggttaacacattatcacaacaatgtcttgtttgaagtcttgcttacactctgaatgtagcaataagaaccctttaaatgagagtgacaggagcaggaaaactactttctattgggtagtcagtagagtgttttctgaagaggcgaaattaaagctgatacccgagtagtaggaacttgacaatttgttgtgtcaaggaattctgccagaaaatgaagtggagaaaacatctgaggcaagagagggcttagcatgtttgaggagctcaaaggaagccaggagaaaaagagtgggaaaatgagtcagaaaggaatatggaagccacagtgatgatttagtcattatgtcaagtactttggaaagtcatctgacttttaagcataggagtggcatcatttcatttcatttaaaatggttgttttaagtttgctgcatattcctattagaagaagaataaatcaaaagggctgaagtggaagcaggtagggattgcaattgtccaggtagaaaaaaaaaacaggcaggaaaaaggggatatttgtggatattgtagttttctgaggaacctccatgctgttctctacagtgactgtaccatttatattcccactaacagtgtagtgtagttcctttttatctgcatccgtgccaacaattattttttgtctttttggcaatatacatcctagctggggtgaggtgatacctcattgtggttttggtttgcatttatttgatgattaccgatgtggaatttttttttcatatattaattggccatttttttcttcttttggaaataactgttcagattatttgcccatttttgaatcccatcacatccacatatgatatgatgttttatatcataaaatcgttatttttctttttatgatatctgagtttctagcttctgcacagcaaaggaaacagtaaacagaatgaaaagacaatccacagaatgggaaaaaatatttgcaaactactcatccaacagaggattagtatcctcattacatttttgatgaggactttcacacttacatctacccagaagtattattcctatcctaacatgacacattcctttattctttttaacagatcccattagatctggcagtacttgctgaaggagagtgtttgttgatagtctagaggaagaatgagggaagaatcaaagtgttttcagatatatttctgttatgagctacattgtaggtcattgtgattttaaagaaagagtgggtactaagagaagaacaaaatggaatagcttactagagtgactagcggttccatcttagccatatttatttcggagaaaaagacaatcagacatgtatctggaagtcaagtacacttttcaaactgggcatataaacgaggtacataaaaataaagataacatgtatataagatactgtttcttgcctattgagaagatttccccatgctcccatccctaaaatgcttggtcaaattggataattcgtaaactcttagagatggaagagaatctatttttgtttaaaccactttgttgaggtatgactgacataccaaaagctgtacatatttaatttatacaacttgattagtttggggataagcgtatacccatgagacttattaccacattcaagatgataaacttacctatcacctccaaaagtttccttctgccccttaatttatttattttttttgttttgtgataagagctcctaagatctatcctcttggaatatttttaacaatacagtatttttaactataggcccaatgttgtacagtagatctgcagagctaattcatcttgcataactgaagctttgtatcctttgggcatcattttgccattttcccctctctcagcctttggaaaccactattctactctctagttctgtgagtttgactattttagattctagggaatggaaggaaatattcacaaatcatatgtctggcaaatgattaatatccaaaatatataaggaacttctaaaattcaatagcaaaaataaaactgaaaaataacctgattaaaaatgagcacaggacttgaatagtcatttctctaaagaatacgtagaaatgaccaacaggtatatgaaaaggtgcatcactaatcatctgaaaaatgcagttaaaagccacaagaacctcttcatacctgttagggtggctattatcagaacaaaacaaagcaaaagatactaagtgttggcaagaatgtggagaaaagggaattcttttatggtgttggttggaatgtaaattggtgcagccatttgggagaacagtttggaggttcctcaaaaaattacaaatagaattcccatttgattcaccaatcccgcttctggatatatatccaaaggaaataaaatcaggatctcaaggaggtatctgcacccctatgtttacagcagcaatatttacaatagccaagacatggaaacaatctaaatgtatattgtcaaataaataaaacatggtatatgcatataacggaatattatgtagctttaaaaaagaaaattcttccatttgcagcagcatagatgaacttggaggatagtatgctaagtgaaataaaccagacacacgcggtcaaatactggagaatattttttttgtggatggaaaggcacagtgtgtaagaccagaagctctgagatcagatcgcctgggtttaagtctatccacatcataaactgcctgtgtgattctagaaaagttgtttaacctttttgtgcttgagtctcccaatctttaaaatgtgatgatattaatacataattcataagtatataataattaaatgaattcatcttttcaaggtgtatagagcctcatctaacctagattaatcactgtacatgtttgttagatagaaaacaaatagaaacctacatatatagaattataaaacatgtatactttctaagtaaataatatatggttatatattttaattattagtggctttaaatttatagtaaatagttatcaataaatgggatttagaggttacgtggatgtctttctgccagcttgcagatcattgtctttctctgggtcagtatactctttgggtgtagtgatccccagatctctttcgtcagatctctaacagtctgtttttccatctttctgcaaaaaactagcttcttgttttaccgagaaaatataagcaatcagaatagaagttgcagtactcccactgacctgcatataagctcacagactctactttccctttgtttacatagatgaactttctgtgcttttgtctaaggccagcttttccacttacgtacctggatccctttcccttgtctctgcacaaggacattgtaacagctaatgaacagccctctacctcctacatcttctccacgctacatcattcccatcattcccatcagtagagaattattctgtaatatctcctgtcatttaaaagaatcctcaattggacaacaatctctctagcaacctctccattcccgtttccctttacagacattcctttctctccatttcactccttcccttctctcttgatgccaattaagagagctaatcaaactgttatcctcactattctattaaagcagattttgtcagggtcatcagtgaattcgtattactaaatcgctaaattcagttggcttctgtgtcatcattctttcttaattatctcttagttttccctgaccactgtcaatatccttggtggttctattgccctgaccactaaatttgaaagtgttccagggctcagtctgtggactccttttttttttccccctattaccacccactctccgggtcaacttatcaagctccatagttttaaatgtaatctgtaagttgttcctgctgtaagttttttttttttttttttttaacaatctggaccctttctaatgatcctagacctgcatacccatttgcccactcaacacctccacatcaattaataataggcatattaaatctaacatgttaaaacaaaattcctgatgtataccccagtctactaccctagaaatttgcctgttattacaaatggcacctccatctttccacttattcaagccaaatcccacgagattttcttgtctcctatatttctcttacagccgaacatcaaatctatcaccaaatgctgtcgtttttgccttcaaaatttccaggatccaacaatatctcaccatacttgagcacgtgcacacacacacacacatacacacacacacacacacacacacacacacacacacacaaagtatgtatgtgaatgtatagtttttactagaagtcttggctgaattccattagtccctctaatatttttgtagcttcaccaactgccttaaaagattataacagagcagagtttctaagtagaaatttagcagcaggatttcttaatttataaaatagcaaaaatagcagcatgttttcttaagtttattataggttcattgactgcacaaaataacatttataccttttctagtacaattgcaagacatattgttctagatgtgttagggtgaaacatttatttacattgtagtagatcaagtactacatttacctaggtaagtaaagaacctaaaatgaagtattatctatattaggctcaaaatggttgtaaattataaggaaaatcaatgcgatagtgattctacacatatttactattgggcaaagtaccatgaacacttcattttactaaaactgtgcattatatattaatactatgaaaactctgttacttaaaatgtataatgttgtttcaaccagagagaagaataccatcttttgaatagagttactttttaaagtaaaagcactatgtataatgattgtaatactatagagtgccttgtaacaaggtgtatgattttcttttagatgttttaagttttgcatttttctggttaatgagtaatggagtccattgtagaaagttttagttttcaaaaatgcgtgaggctttaaatagcagatgttttctataaccacagacagactcttttgcaacttgcattttacacgtaaaactttatattgagccacttttcatttcagtaaagatgtatttgtgatgcacagtatcccatagtatatatatgtcataatttaatctctcatgaaagcacctttgggtttgttttcaagatgtttggtctttaaagctgaattaaatattgtacatgttagtctctacactttggttggcatgattcactctcaaaaaatggagcagttgactcagattcgtggacattaacatttttatatgttttgccatcttactatctaaaaggttgtattatgttggatatttccctcaacaagtataaaaactttgattttcccacatccctgcccaaaatgggctctttattaattattatttttccctgtcttaacatgtgaaaatgcattaattcacttcgatttgcaatcatttaactataaatggtattagaacatcttttatatacatgtattgccatatattatcttctttgtgaattgccaaactacgttttatgcacttttcgttttttctttttaatttatgagagtttctgtagatacatgattatgaagttcttagaatatttaaaatagtaaaacattatgaaagaacacaaagaataactatttctatgtatgccaataaaattacttttccaactgaaacatattattttaaaaagccttgtttttctccattcacagaaaagcattgtcacacaaacagctgaattatcatcatcgggcaatacgttcattttattaagtatgccaaataaacagacatgtcttattttcacacttatgggaaattgagtgtatctgatccccatgagttattttcttatgcatataagctttttacttctttatcattactatctaagctttctgttatttacatactgatgaaataatataataataatgtttcatcactgtcaataatcgtgttttgtttgtttgttttgtggaaggtctatgccagaaaggaggccttgaagggaggtttggagaaaactgtaagcctccagaaagatctatcagagatgcacgaatggatgacacaagctgaagaagagtatcttgagagagattttgaatataaaactccagatgaattacagaaagcagttgaagagatgaaggtaaaaaaaaaaaaagaaaaactaagtaaaacaaaggaaataaatggaaaaagaaagaaatgcaacaatgcttgaagttgtatacagtctgctctttcctggttctaagagaagaggttgatttttaattaataattttaatttagcttcaagtttaatatacattttaacaaccttaaactgtttaattttaatgcattgtggtcaattatgaaaattgaaaatcacaatttgaaacaattttcccttgaaatcatgtagtattaagagagcagaatcaactcatttcattaactgtctgtagctgatgtaaatgtacgttgaaactgtgcaaaagtattcttgaaaagacaaatttataatgtagtcaacaaactgtgttaatttggtagtttgaaggcatttctgagaatttggaaacactaaatatttgaacccgtagcctttaatatggatagaaaggactgagtttacatgtacttttcttgaaacaataggacaaaatataacattgacttattacgaaggaaactggtatgtagtatgtagtatggatttggaggtgaagcctggacttgaacctacatagtggcatttcgtatggccttgggcaacaatataatagtcaatataatcctctgttttatcatgtttatatcatcatacttcctcacttgaatgtatgaactgttgattgtaactaccatgtgagtaaattgcctaactcagagttggtgctcaattagtagctataatcataattattatttttatgtgctagcaagaacttagagaatgacttgaaatattaatactgtagatctttttttggttcaaggattgtgacaaggaaaaatcaatgtggagccagatacttgagtttaaaacttagttcggccccatgccaactgtataaattggggtgagttacatgagcttactgagccaaattccttcgtttgtgaactgggtatcagaatgtctgctttcagaatcattagagggatgaaatatgaaatttctaacacaatgcctagcacagtataaatgaccatgactcattatttattattttaattgtgaaagggccacatggtaaaaaattatataattaaatggtaattcagaaatatctattatagttaatagcagaaagtaactcacatgaaaactcagatgtttaaatatcgaatctgtcatacggctttagtcaaatgttgaaagtaaatatctaatatactccataaatatgtataaatattatgtgtgtataaaactataatgaagaaaaaattagtataatcatttctagagtattaaaaacacagaattattctaatctagcaatagcatatttatcaactaaaacttattgcatacttactgtgtgccaaacaccctctggctactgaatatagagggtggtgagcaagaccactgccttggaatttacattctagtgttctagcgtgtggtgaggagcaggcaataaatggaaaaataaatgaaatcatgataatttgcctagaagtaaacatggattttgaaatcaagaatgaataatgttcaggcaggatttgagggtggtaggatgctattttagaaaaacttgacttatagagcatttatgaagaattgtatgtaatatgagagaactgaatcataaggaaaagccaaccacttaaaaaaatctttatggaaacacattctattcagagagcatagcttctgcaaagaccctgaagctaattgggaagagaaagaaatctgcctgaaggaaggaaaatgggataaaattacctcagataagtcttaggaggtgggcaaatatctgttaacaaacgggttttgttagagtatcacagtttttattctaaatggacaagaaaaaccattggagtatttcaaaagaccaaaataatttaaaatttgactttggggaggtcacccctgaggaaaactttatcagaatgtgagagctagaaggtactttgaaacttgtgtaattcacacttctctctctgcttatcagaaaactgcaattcccagataggtcaaatgatttagccatagtcacagactttatttgtggtagagcccacaggattgaaggtattttattctatttcatctcttttttcctttcctttcctttcctttcctttcctttcctttcctttcctttcctttcctttcctttcctttcctttcctttcctttccctttccctttccctttccctttccctttccctttcctttcccttccctttccctttccctttccctttccctttccctttccctttccctttccctttccctttcactttcactttcactttcactttcactttccctttccttttcctttcctttcttttccattgtgtgtcactcatatggccttttctcttgtatctcaattcctttctcactgcgtctatttatatatggccactacctcagatccgtaagtagatactatagagtcatttgtgttcagctgctctgattatccctgggttcctttggttcagtgcctcttctggccctcttccctctccctatgagcgatttgcctatgtcaccaacaacccagtcagatctctcttattttcctgtgctctagagtaaactgtctcaaatttttaaaatttgaaaaccatccttgaaatgagtgttccaacaaatttgtctacattgattgacatgttttgataattggtctagctacaaaattggtttagtatgggggtgatagtaaaaagaggtaaactctggaagcctctggcaacaaccactggaagagttggcaggaagatttcatttcttgagttttcagcctgctactcaagacagtttctttaaggcaacttcactacctggaggttagcaatagtaccttgtccagacttctacctgtgctcatttgatagctaatttttctttattgtcagaagatactaacagacctattttgacatctctccctgatactcaaagaagaaatagagacccccccttctgtttatgttctttcctgtgttttacctgaaaatggaagtgctgttttaataacttatttttcccctgaaaaggaaagtttttttgacataaaagaacccagggtacagtttgataaacaacctctgactttaaaacttttatggagatcagcaatcactatatggtaaaactttatactaaaaccctttgaaaaacactctggaaagttattaactggttttatttttttttaatttttactctattataactctagtactagtgcttaccagaacttacacataaagtgagaatagtaaatacacaaataaatttgtataatcactacagcagtgattcctgcatctgaatggacatcagaatcacctggaagtcttgtttaatacacagagtgctgggccctgaccccagaatttctgattcagtgagtcttgggtgaggcctgtagtttttcatttttaacaagtttgagtttgataccaaagaacaagttgcagagtgattccaagggtgctcactttaagaagcacgggtgtgaaatcctagcaatgaaagatggcagagcatatcatagttagattcatggaaagaaacaagagccaccgtttttatgaggatttgtatagaaactgtaccagtcatttagctttctaccttttctcctagtagagaaattcatcatcatcttctttcctcatatgtacctggattaataaattttgctgtttgttcttcgaacctttcccaagatctgagcctcttattaaaccaagaatatatgaagtctaaaaaccatggaaagaagtgttcttcattctacatttttatatagttgcttgggttatttataatgagcataaattgtaattttattcattagactgactacagcatgctccttcttcagctcatggaacatttgagacccgcttaacagaaactatgagaaagagaggatataactctgaggatgatttccttaaactctctgaacctcagttttctaatgtccaatatagaggtaacaaaacacatccgagaaggtttgggtaaagatctaatgaggtagcacttatgacatggctggcacagaacacagtagcacatattaaatgatgaatggtaatcaaacttgttgattatactataattactaaagtcaaaatgcaatttgtgtaaaaacaatctctatgctcagtgatgccaaaaagctgatttatttagaatattgaactaaagatttcaatcaattaaaatcggtgaagttaagcattctatagacaaaacaatttgcattttctgacataatgcatacttttaaggaattgtgggactaaatccaaaggagtagggtgattatgctgacacatacaaaggcattttatagctgaccttatccatatcctgccaataagcccttaccttaaccaccgcattgtatgcaggcccaacttctacattatagaacctgagttcctttacttgagggctttctgtggccactgaatcccacttttgcacttgtgtggtaggcttgcaagtactgggaaattaacatttccccaacagcctttaacaattagggaagatgatacagaaataataccccaatttcttcacccctgaatgggataacccgcaggcatatatttctcagggctttctaacaggattaaactctagtcattaacagtgtttgctgggattaataagtatgcccatatggatgtctcttccctttcttgtctcaattccccattcagctaccagaatttcttttacatggcacacataaataaactacttatatttgaaagctaatgtcaggtttgacccctggaggaacacagactaaagatacagtgtgtatgtgtgtgtgtttctaaaatacatgtacgcatttgaagttaaggagtgtaaatgtctcccaaccgaagaccaccaccaactctcttgtagctgaacaagttgggttcattattttttgcaatgagggagaatacacaacatggaggccagggggtgcgtgtggatgaaaaaaaaaaaaaacattgtaggatttgtgcttgtgttaggggatttgagggagggtttaaaagctttactttggattgcttgtcattagtgtgtagggatagctatatgggtatcgtatcttgtccagaaggagagaagaccagaatgaggctaaagttgcaattaataaagaaacggcgttcgttcatattaaccaggataggagagtgttgggcgttttgtggtttgggtaatgttgatgtttttgtctggattcagacatgattatggaatgatcttgtcatggtcttgatccattatggaaacaaagtggccttttccaatgttgaaattctgtgaaacagtttattttccacttgagaagaccaaggcatagctgggtgtcaggccagcttctgatatcagcagctccttttttggtttctctttctctcatgtgttttcaattctcgaacgaaactttcttttatcaaaatatgttcctaaatatagcatcaaggggacctttctatgttaagtatcctttaacttaaataatgatatttgtgatggtttcaatattattcatccaagtaatttataagtgatttcaattctagactgccaaatattttttaacctagttaatattgaaatatttgtttcttgccttttccaaacaattgtatttatatcaatgtgtatatatttgaccacaaatccatacctccatgcagactacttttcagtctattcttgttacagatctgttgtattcttataataaattatttctttaactttccaatttcaactaaacttaaatttatggaagagactggagttcatattagatttatttttgtaattctcattctaactgggatgttgtgagaaagaaattatatgattcatagaaatgcattttggatgtaaagttattttcatgctattaagagagcattctttatttttcagagagctaaagaagaggcccaacaaaaagaagcgaaagtgaaactccttactgagtctgtaaatagtgtcatagctcaagctccacctgtagcacaagaggccttaaaaaaggaacttgaaactctaaccaccaactaccagtggctctgcactaggctgaatgggaaatgcaagactttggaagtcagttgcttttcttggtctttgtcaatgatatgtcaatacatggtcatatgtgaggcatagtggttaagaacatggataccagtgcaaaacaactttggcttgaattcctcattcaggcacttataagttgtatgactttgggccatttgcttaacttgtgtaaacctgttttcaatctgtcaactagacataatacataattcataagttgttgagaaaattaaatgagctattctctttaaactacttagcctagtactcaatatatgtgagtagctatgcttctaattctcattactattattaggtcataaaatcctataaattttctccagatttatagacaatgatctttattttttcttatttttgtatgtacataaacttatttaagtatctttggggaaaagcattctgtagagaagtatgtttttactacaattgtctttagtaattgccgtgccccatagagttctttgttagacatgttacctaaccagctctatattttttgatggtttgcattatatttatgtattatcacaacttctgctttaacttttatggatgggccttactgtctagattatgcttatctgaatttagataaagaaagcaggtgcctcaaatgatggccatgtaattgcatcaaaaataagctatgacctttcttatgaaaatactgtgccaaggggcacaaaactttatccactacaaatgctgatgctgccagacattgcacatgagttggactttaagcccccttccctcacacagactgagttattttggtgaatatggttaataaagtgttcaggtacctctttacttttgaaaaacattatttagtttgcttcctatgttgagggtttgatatttaaagaaagatacgattcagatcaataataaagtacacctttaaaaatattttaaaatgtatttgtagctaaagtaccccatatattcccaatacagtattatcattttccaattgtaaaatgtgatccgagtttctccattatcagttctaagctcttctttactcatccttattcttttcttttaaatgcaattcactcctcagactcttgaaaagtgccttctatatgtcaggaaatattacagtttctgaggatataatgacgtatcttatgtatcagtgttatgtgagtgctatataaaatataacaaagaatgggaagggaagggatctgatggcactgtacatgtctcaagaaaaccacaattaattcactaacatgttacaatagggagggactttttgtacccaggaaatgctttctgacaatgtttaaataaaacacctactattactttcttatgttcttaatgtccttaaataagcatcattgttccctattattcatgttgttcatttaaatgatactccgtgattcattagaaatttatattggagtacattttccgaagggattttcttaagttttcgtattaataacaaacttttcaagaccaattattggattatttttccatttccttctcatgtataataacatttctaacattccctattcatattgaagttatcaaattattgagttccattttagtcctttttcactggtttggaatatgtactttattttatcttataaatatttctctatacctctctaacaataatatggtggaaacattagcatagtttaactctgaacctacctcttccgttttccgcgttattgttgcctcatatttcattttcaccttatttcccccaaattagtccatataattgctgttgctgctgctgttgttttaactatttcatataatatttatttagatttaccgatgctattttcccagtttttgtgatcagttttgccttttgttcttccctttgcttctgtgttcagtttctttcttgctctttccttgagtgtgagtagcaaatgtgttcagattttacatattgaaaatgcctttattttgccctgagtattggataatgatgcagttgagcaggaaattatgtaaggacaggtttttttttttcctacaacactgaaaatattatttgtcttttgaaattttttgcctttaggaaatctgctgtcaagttattgtttctttatcattttctctggtacctttaaattttctcttcgtcctgtctgctctgcagtttcaccctattttgtcttctacagtttcactcaactttgtctgtgtgtaaatttgctttcatttatactttgtcacctggtgtgttaattagaacagatacgttatttctttagtggttctgcattgtctttgtgaagattttctttttcccaatctcttcattccttcctaagggaaaactttcttagagctattaagactatccccttcttatattccagttactggtttccctttaatattttctatattcttatctctatctgctcaattttggatacttttctaaaatctgtcttccaactctcaaattctcgcttcagctgcctgtggcgtaatttatccttcaatagagaaatagtctcatctttgtctgtatatatatttatctctctacatttatgtatgtgtgtttatattttttcaaaaaacatattttccatttctcaatattttattgagttgtttcacaaatctgttctttgttatggttttcttcttttttgtgattaattctatgtattcctttaaacaacttaaacagataccatctgtttgactgaaatgtttcaacttaatgagtaataaacatgacaccgtcttatttttccaataactacacccaactctgtcaaatttcaccttctgcctggtagttggcttctttaacaatatttctctgggatctcattactttttattcacttttagttattaaaatgtactctaatttaaatttaaatatcataacttaatcaaatatttcacaagtttagattaatctgttgcttcagcaatttatacagacgcaggagtgagaataaatggtctcacagtctcctcctccatcccagtttctggatacagatctactgtcgatataagggagggtgaagagggaaaaatactctcttcatgtgaaagtcctttttttgctgctcacaactgctgttcccttttgttaaaacccacacacatctataatgcctagtctgttgtccctcttctatatattatcaccactgacctggctcgttctctatagacttgattcgctctgttgaggatccagattggccttattcatatgagctttgaaccccccaaaaaagatctcctaggcttttatagtacctcgtagtgtttaacaagaatttcaagctgacgcttgtcaacagctttacacaaactgctcttgaatattatgtctttttaaccaatgctttagtgatgccctggagtctaatttacctaccatatctcaactcagagcctatgggcactggaagtacctatactccgtacctttcaggaatgagaagtttgaaagagttgtttttgattccttcttggccataccaacagctcaacaggaaatgaataccaaccaccccttcctgaatatatccacccagtagatgagtggttttgttttagatcctgtaaataaaatgattcagatgagtttaccctacctatccccataaaagggtgagaaagaagaattgcctaactattcaaactctcttcacctcactcccctcaagtctccgtcagctctctctgtttaaaccagggcttgtgaaaacaagaaagagatgatctcccaaaatgaaatgtaggcaaccaagccctttttcttaggtgtgaattccacttgccagtctcaagcaaataaactctatgggaaacatacaccatgaggctaggcatatttattgtacagttctccaaaattgttctattatctttatgtcataaggtatggattctaccatttgttacaactaatgactccctctaatggaagtgaatttccccatgtggctagtaaggtttttgtttgtttatttgtttatttgcgagctcatctataataggaattgcctttactggaatttttgtctttttttttctctgggctattgagtttttgtattgttgccatcaggattgtagagattttatgctctgccctcatgtgtgatacaagcttaagtttccgtttgttatgggtggatctttatttttcagcccaaaatcccccaacaatagtttccttgctaaatcataatattccaatggctagggatgttctacttcttccttacagggtggatggcacactgcttcattctttcccatttccctggcttgcctcatttcccatctcaagttagtgttaaatgccccagctttgatgtcgtataccctgttctgatacgccagtatttttataagcttgattttccactttctactttcatttccctctttttctttctcacacctgaggttctatatacatgttttacagatcagctatgaattaaaaatgtttcctttgtattttaacatgtattttggtataactgaagcaggatatgttgggagttacctcatcagctccatctactattttgaacagaagtttagttttttatttgtactttccttcaaagccactttggattctgtgatttcaaagtaattttaagatccaaactgttaagcttaacagttattctaagtggcttttagctccaattcgggcttcaagactatattttattttgcaaaggtgacctgtaaagctggtacattcagcctctccagctgtgtccttcagatgcattgaggacagaagaagctatccattctgacagttaaatcagcaaggtagttcattacctcaatctgcaccaaagttaataagacacattaccaatcacgtctccttgtcttcaaagctctaaggtaccctcgggtatttaagaagatatttatattttcccactgggatctttgcccagaatgaagacagcctgtagtccagcaggagctggaaatgacccagattttagatttctatcaccttttaaagcaaaacacttaatttcactttttgcaataaactgtacataagatatcaagcaggtatgaaaggttggtacgtttgccaagcaggtgagactgatacttttcatcagatagagatcgaatactctgtgtcattctaagggctatgaacatagagaactttgggaaatctgattaattttttagatccttctgaaataaatcttcctttcaagcctttaattttggtggtagtgaggcgggggcaggtggtagtaagtggtgatgattgctgcattgtgtttactgtacttataggttcattcaacagttacaaagctaacagaaaatgaccgttgttacattcttatcctctctcgcatcttcctatcttttccccaatagacataatcaccatctagaaagctacctttgttattcctttgtttaaaaaaaatccacacacatatgagtgaaaaaacaattgtgcttaatttcagtattacagtaatggtaaactataatatagtttttttagggctttgtctttcacccaacatatttgtgtctgagattcattcttatggttctttttgatgagatttttcattgtcacgtctgtattctctgtttaaagatgacggtatatttttccattctccttgcagtggacattatttccttttttttgattactacaaaaagggctgaaatgatcattgttgtaacagtcttgttatccatgttaaacagtttctctgaggatgcacatatcaaaaagtggagttgttgtcttgatgggtatgtgaatgttcaccttattgagaataacaaattgttttctgaaatggccatttcagtacacacacccaccaacaataaatacaaatttttgttcatgtatatcttctctcacacgtggaattgtcaaacttctcatttgtgtcaatcaacatggtatctcattgtaatcctggcctacatgtccttgattactaatgagattgaacatatcttcatgtttaatgtatatacatatttctctttaagattttggttcaggttttcttttcattatcgattgggttattcatcttctatttgacttgctggcatttttcatattcttatgtgttacagatgttgcagttgttttcttctattttgagtctgtttttcaattacttgatggtgtcctttgatgaatagaaggtcctaattttaatgtagtcgaatgtattcatctcttttttcttacggtcagttttttacgagatgtcttacttaagatattcttctctatgccaaagtcagaaatattttcttctatattttcttgtagaaattttaaagttctgcttttttatgagtacttctgtgtataaatcagtttcataatacaaattaatggccatttaaaataatcaaacctttgaattagtggtaatatttccgataatatacctcaaggaaataataagaatgtggaaaaatagtccatattcacgatgatgtttaccataaatttataatagcaaacaaaactaaaagtagtctatctaaaaaaaggaaattgctaaactaagatagagccactttaaagaagtcttagattttcattaaaaatatgtcttcttagtaatacagaaaatggtatgatataatgtttagtgaaaagagagctatagttaaactcacttaaattttaactatcaaattatatatgataaatttcagaggaggtcacagaatactggtaacagtgatgtgtgagggagttagatttacatatgcatttttacatatgcttttatttttctgtttcccagactgcaatgttggtgcttatttttattttaaaaagtaaattactgtcttttgaatttattcattattcatgtaataaaatgttttcttaatgacttttgattgtagaggtattagatgatgaaactgtctagctgcattttgaattacctgctacaaagtaaaggtgaaaaatacaaagtgttatattttcagaagttttaataatgaaatggcaaaatttcacatttacttttctaccataatatttaatctgtgatatatatttctttcttaggaagtttgggcatgttggcatgagttattgtcatacttggagaaagcaaacaagtggctaaatgaagtagaatttaaacttaaaaccactgaaaacattcctggcggagctgaggaaatctctgaggtgctagatgtaagttgtaaattaagccaaatgatgataatttatatgcagtattaaaagaggtcaagtaccaaatagaagacaaatccaaagaaaacaacccaagagagtataattactatgttatcactcagcactggtactttggataaagcctttgttccccctaataaccttctaggtcacaagattttgcaaagggtttaaatggcttctcacagaggaaatttgcctttattatatcactaagttctacatagatgcttcacctaattaaatgtaccacaaacctgcaaagacagtgtgaataaacaaactcactgctttagggctaatcgggatgataatatgaaatattatttccagtttaaaagctgcacgtattgaattggaacctattttatacttacttaaaatcacaaatttacaccttacggaatgttttgagttattaaatggatatgctttaatattggaaatatatctttaaagtattcataaaatgtaagtacatttttaagttttactttggagactttcaataattaaatgagtttgcatttataaacttgactttaacttctgacatttaatcattcaagctctatgcattttagtgtacttttgacttatctatatgtaatgaatatgttgttttagaatatgtaatatatgtacgtaaagctataagtagtatagcccctctgtaaatctataaaataaggagcataaattattcaagatgtgaagaaaatgtaaggtatttctttagacagaatagaatttgtaatcctagaacatcagagtagacacctatagatcattttatccaacttcctaattttcaaaaggaaattataaaacctgaaaagatattaaagtacaatgaagtagatctccagtggactttaattttggctctatctgactatgactataaatttgtcgtattcagagaagttaattgaccaaacatttcttgtgaatcagcaatgtgttacatgttctagaaaagttgcagcaaatttacagcacattaataaaaggacagtggccagaacagaagataggatgatgctgttagcctatgaaattgtcaaatcgtacatggagcaccatgctaaattcttgctctcacagtttcagtgatgtgctgaaaaactagggcatgttcacaaaggaatgttaaggaaagagagaaaatttgaagccataatgaagagcatttagaaaagatggggaaacaaaacttaccattactatttactattttagacgaggccctcacaatgcccacaacacagacaagcagggaggaggaaaattgcgagtgctcttatcttttatttctatgttgtggtcataatttcaaattgttcctaattcagataatggagccaataaatgaaattccacagtgaaaaaataaataaatacatacataaaattggctctttggtagtgttgctgatgcttatccaggaggacattttgagtgaaaagggctagatcaccacgtatcaaggatagaaaaactgcacgacttctaggttttcttgcaactcaagatatttataactgatcccttaattttgctttgttgcttttcatccacctttaaaaaaatttaacaaggtatatactttgttaagacttataaaataatgtatccattaaaattatttatatccattttgcaaataaatatttacaaaattaagatttgttagaagtaataaggaatataaattattaggaaaattattaacaatcacattgttctactcaaaaatttgatggcttttaaagtattttacaggttatagtgattttttttaatataaatgtatttaggaagtctctttattttcttgaaacttaataggacaatgtattgagtttgctcaaaattcaagaaaaatacataaacaggaaaaattacaaatatgtattggaagattttcatttttttaaaacaaggaaaacagaagatttaataaatttgtgagaacatatgcccatcacttattttatagatatgtttgaggtccagtaagatgaaattgaatcccttgttttctggcatgcctatgacactgagattcactttcatcatattatctagccaggcaactttgtcaattttgagcagtataggagatgggtattattgggatgtacgtaacagagaatcagacaacggtttaagctcacaaaatgatcttttctcaccacgaaaagaatagtgaagggaggttactcagggttgaggatggttcagccatattatgaggcgagtaggcactctctgctctctcttcctgagcatgaaggacctcacactcaaagtcattgcctcccagtgcaaagatgattgttatacctccaggccatgtatgtgcaaaaaagtaggaagggcaaaaggattcttcttgagagagtactctttttcagaattgtgtcacgtggacaccactagctatcagagaagttgagaaatttagtgttttacctcttctggttttagagttaggggacgtcaaggaaaaaggtggttgtgaatcaagttttaagttctcagtccgcaacactgtcataatcccatgaagattcatatagaatgacatcctattttttgaagcaaaaatgctccttggtgtttttaatcccaattaaaatttgctttaaattgattatgacttaattatatgtaaatcagaagatactgagcatttgctgataatccaatgtatttagaaaaaaaaggagaaatagtaattattgcaaatgtgtttcagtcacttgaaaatttgatgcgacattcagaggataacccaaatcagattcgcatattggcacagaccctaacagatggcggagtcatggatgagctaatcaatgaggaacttgagacatttaattctcgttggagggaactacatgaagaggtatgaagataagtgaaaaatctctttaatctaatttgcattaatgtatagcagatacaggcctctcagataaaatgagcaatagtttaaatattagctcagctttcaggtttcagagacaatccaatgccagacactgggtaaattctttacatgtgtattatagcatgtgatttcacaaaaacattgtaagttaggattcttaaaaggcaactgagacatcccaagaaggttactctgaccacagagttcttttccttactcaagatagaccagtatgtgtgggtatcctttctctctcgctgtctcattttattcctctccctccattccacacacatttgttatgtcacatgtaatctgctaataatacatgcaattctgttagtaccccatattatttattcttcataaataacactacatttcttatagataaattttcatatatcacacatggtgtgatttttcaaatcaaaactaaaacaaaatagcaaatttctcctagtcagtgttttgcatactatctcctaagaatggattatttgtcaagaagaaaacccattttataatgatgtttagttttatattcacttactgagtacatctactacatgtgagatatggttctatggtttgatgagtaggaaaaatttgctaaccttcataacttaaaaacattggttagttaaggaagagttactgatttcctagaatgtgcaagacataaaaacaaataatataacgtatgaagagaaaaaagagaataagggggggtagtaactagggtagtatgcatgaaaccattgactaatgacttattgaatagtcaatgtcggggaccttttgacatgcttacagattgaaaaggaacgccttgagtaggaaaacctcttctctatccaattctgaagagaagtatgtgagggtagggcagatatctgcaaatgtaccagcagcacctccagtcttgaatcctgggtggcatatccatattttatccaaatcaacataaggaattggggattggaaaaggggaattccaaacaatctctggtccttcatcattgttgcactattgctggatctgagtcaaatagatattgctatgtggcaagtaaattgaagatcatttcaatgtgggttgtgatatggaattggaatgtgtttttatttctatttgaatatcagtgtcaggtaggagacagcagttgcatcaaaaaattaaaagtcattgtgaaactgaccttggcttagctgtgaaaagactcaaatttttttttttttaaagacagggtcttgctctgtccctgagactggagtgcagtggcatgatcgtggctcactgtagcctcgacctccctgggctcaggtgatcttcccacctcagcctcctgagtagctgggactacaggtgcatgctgccactcccggttatttgtgtgtgtgtgtgtggaaatgttgttttgccatgttgtccaggctggtcttgaactcccgggctcaagctatccacttgccttggcctcccaaagtgctgggagatacacctggccaagatccaacttcagtgtttgacatttttcagtactcatctattctgtccttaggaatagcttactctctaacttgatcttggtattaactctattaatgtaattatattgcaatcctttattaacacaaaactacttataaccttctattttaaaggtttttggtataaaccctgacatttcccccaaagaaaaaataattcatttcagcaacataccctgattcaacacgtattatcttattttctggactgagtttttaaagcataaacttttgaataagaaaatacttgaaacttgggctagaataacaccttgtattagtagtcagggtccagacagggcacagaaaccactcagtcacttaaacagagatggtttaacacaaataagtattaactacttactggaaattaatttttaataggaaataaaagagatctctaaagaataccttaagcctgaggaatagtacacaaacaaggaactaatatggaaagataggagctcaacccaaggctggattcaaacttctttagaaagtgtgtgtctgcctcccatgggatgacagagaagtttccttcattgacccaatccagaacaagtctatagccagtgagctgaagctagtgtgaagagaatattggaggggaatgctgacaaaattcacagggaagtagcctatggtggggaaccattgaatttgctagaaagctgtctggtgtattcattggacatggtgggaaactacctgtagtggatgctactaaacttgaggaaatgaggtggggctccaggaagctgcctatggatttgccacccatcctcaatttgcttattgggtacccatagaacttgtcaaacacgacccatagtgttgctgaaagtcttctgggtaaagtggggtggatgaggtgagccttactgggcattccataggccagcccagagtcacaggtttgaaaaagaattaaaagcacactgggacagacaaacctctacctcccccattgtcactccagcatcctttactgacagaacttaatatcatgtcagctggcaaggggagaaatgttcccgtgtcaaaaacaggatcatgttgaaaggcaaaaaattgataactggcaaatccctctgtaattcactggctatgtgattttgagtaacagttttaaacttacgtttcctcatcctgtttcatagggggttttttttgtgagcaaaatataaaatacggcacttaaagtactatggttccaggaacacagtacatattcaataaattattcaataaatttaatacatgatcagcctttttattttgactagatgatattctagagtatcagccctcaaaaattgtgtgtgtgtgtttgtatgggtgtaaatatatatatatatatatatatgtaagtatatattaaaatatgtaaatatatatttaaaaatatgtaaatatacatatatatatatcccactgagggcagtgattggtaaataaatgcagatagtgcaatatgaaatataatgaaatgcacatgcctccattagttaaataaaatgtgaagacagataaaaaggatttttatcaccctctaagtcttaaaatcagaagctctccacttgtacctcaatgattaagcagagtgttaaaataacaataaatctaaaataagtaaacttgaaactattatcagtcctagctgtgtttatattacatatttggccagtaataacctgggagttatttgacaatgaaaataaagcatatttagtttttacggctttcatgaaaaccacatcatgttaaacataatatccttctcaaattctgttgtatcagcctgtgataagctgattagacctgaaagatacaatgttaaattaaaacaatgtgtagtaataggacttttgtatttctcaggctttgctcagcactttgatcaatttcaaactacttaggtaaaaaagacacacctaataatttattagctaaatcaatcctttggatatttccactatctagttaaaaagactgttgtttcgatgcagtagaataagccttgggataaattatctgagaggctgaagaaacaaaatgattacagtaactgagtttttaaatcaatttaaaaaattcttgttgtacattaatgtgttataatcaagaattctgaatttgttttaggccatgattctcttgatttttggttggttaaacaaaaaagtttttattttgtggttattttctatttttattttattttatttttttgagacagagtctctccctgaagcccaggctggagtgcaatggcacgatcttggctcactgcaacctctgcctcctgggttcaagcaattctcctgcctcagccagatttgctattaataaacaaagtgccttttaatttgaagatgagccttaacctattttttaaaatcaattaagtgcctatgtcagaggtttgtgaggtttttatatcacctacctaatgtttcttatagctgcaattatgcagaactaaggtaacattcaattgcctgttaaatcagtcaaacagccagacttttattgcctatgaatatttaaaagagatttgctagatcccatccctaatttcagagtgtgagtttgcattcaaataagtaataaattatttccatcacttcaaaaggcatctttcattcttgataatcatatagcactatattttctactcacagtaatgatttgaaagatggttagcaaaccaggcaacatctccaacagacgtaccaaatcatatcatttttacaactattgtaatagctttattctctaacagggtaaccaagcagcagaagatgatttagtaatacaacaaaatgaataataatattggtaatagtatttggttacagaggctcaggtacccttttaattgtcagatatgcattttctcatttagttctcacaatagccttatgatacatggtggtttttgtttttgttttttctttttttgagatggagtctttccctgttgcccaggctagagtacaagggtgcaatctcagctcactgcaacctcctcctcccgggttcaagcgattatcttgcctcagcctcccgagtagctgggattactggcacatgccactacgccaggctaatttttgtatttttagtagagatggagcttcaccatgttggccaggctggcctcaaacacctgacctcaggttatccgcccgcctcggcctcccaaagtgcttgaattacaggcgtgagccaccgcatccggccgatatatggtttttcatattcccattctacagaaattgaaaggatattaaaggccctaggaaaaagctattgagcatttagacccatctctttacacttgaagcctaggcacgtgaccatttggctacactacctccaatctctgtgacccttttcatatattaaaaataaaaactctgctaataagtgaatatggcaattaacgagtttccccgtttttaaggaaagcttaaaacatggccttaaaagtattatggctgactaattaaaataaaatttagagtcttaaatattaaagtcacacattgagaagtccaaagcctttaccacttctcttgatgagtgattatttcacctctttcgtggcttattaatgcccgtatttcagtccctttcaaagatgtctgtaagttgttatgcctgacatgaaatagcaaatttactgaaagggacaaaatctaaattggttaattcttctgtaatagtaacatttatgatagactcagagagggccgtattaatttttcctggtaattatgactttgaatttttccctcagtgtcacatctaccttagcatagatagaccagaacggaagaacattgcttgaaggaagactataaagtaatctaggaaaataagtggcatattatgctttattaatttgtcaatatgttttgtagacaatatctgtctataataatagtaaaagccattactttttgagcacagttttacgtcagtccttttgctaagccgttagaagcaacatcaaacttaaatcccacatttgctttatgaaatagatttgattagcttacttcacagttgttgtgatagggctgacttctgttctcaagggctaggacagctaagtcttctgtaatgccctctggaaagcactaggatgctggaaaatgtctagtagttgtattttatgttgctttcaaagaagtataagtaaacctttaaaggctaggaaaaaaatcagatgaaactgaagtcatgccgtaacatgcctatgaccactgacatttgtatggtggagataaaagctaagactgggaaccccaattttaggtgaattaagtcatttgatggaaaagaaatatgatcctctggctcacgaaaatggtggagctaaacacagattccacataaaactggggttctatcagtaagataatgggcagagagaattctatctgcagagagaacaaacataaaaagacatctgtcttctcactgtgagtgcaaagtaatagaataattataataatgtcacctgaaaatgtgtgttggcctattcttgtaaggtgaggaactcttgagtgtatattatcacaaagggtaaagaaatatccaaacaagtgattaagtcagggtagcaccaggttaggagcgtcctagcattagttagaagcaaatgcaaattgtttaccatgaaaagtgccctcagtgtcctcacagattaaactcaggggaacttgagctcatcataaacacatagacatacacacactcactcacacgcacaagaaaagccctcatgaagcacagtcagcctatacaacgaacggtgagtttacttctagaattccggatattagaattgcaagatgtatagtataaaataaataggtaaaatattatagaaataaatgttattgaagttataaaaaagaaaacattgtaaaaatggaataaagaaatcaaaattaaacaactacaattaaaaattagaaaatgaatatatcatatataaacatattagttgaaagaaatgatttaaaagaaaactaaaagagaatgtacagactgtgttaccaaaaactaaggaggtggaagatgtgaacaataggtaatagatacaggggtggggagtagaatatgaacatataacttatctcaatgggagttttcaaagaggagaataaagaaaatggagattattattattcaatataaaaaaattatataacccaatttaaaaatgagcagttgagctcaaaaggcatttcttcaatgaagacctacatatggccaacatatatatgaaaaggtgctcaaactcattaatcatcagggctatgtaaatcaaaaccacaatgatatatgtcttcacatctgttagaatggcagttacttaaaaagaaaatcaagagatgacaagtttggcaagaatgtggagaaaagggccccttgtaccctgatggcaggaatgttaattcatgctgacactatggaaaacagtatggagattcctcaaaaaaaaaattaaaaatagaattactatatgatccagcaattccacttctagggatatatccaaaggaaattgaatgagaatcacaaggagattatctgcactctattgtttattgcagcattatttacaatagcaaagatatagagacaacctaaatgtccattgacaggtgaaaggaaaaagaaaatgtgatatatacatacaatgaaatattattcagcccttaaaaaataagcaaatcctaccatttcgctgtaacaacatggataaacctggaggacattatgctacatgaagtaagccagacatagaaagacaaataatacatgatcccaatcatattatgaatctaatacagtcaaactaatggaaggagaatgtggaatgcttcctgccaggggctaggggaagggaaaaatggagagatatttgtaaaagggtacaatgtttaggttatacaatatagataattcctagagatctactgtaaagcatattgcctatagttagtctatttacttaaactttgctaagaggatagaccttatgttaagtgttctgttacagaataataataatattagaataggaggaaagttttggagatgatgaataggtttatgtcatagattgaggtaatgtttttatcagtgtatatttatctccaaactcagcaacttgtgtatgttaattatatacagctttcttgtatgtcataatttttttgagaaatggagatggagtaatatatgaaggatattaaaggaaagtttccaagagccagtgacataaaccacttaaacagaaagcacattatataacaggcaaagtaaataaatagaaatccaatctcagacatatcacagtgaaagtgcagaaatccaaagacaaatttatattagcagctagaggtgagatggataacctacaaagcaattaaatttaggctgtcattagacttcttatctacaacaatgaataagaataaaaaagcaatggaaaatattttcaagatattgaaaaaattaccgtcaacctagaattctgaactcaacaaaattagttcttcagagtaagaggaaattagacattatcagagtgaaaaaaaagtgaaattttaccccaatagacccttactataaaaatgtctaaaataagtatgaagaattagaagtagtagaaaaataagttttaaaggttttagatgcaataagtatgatgaaaaaatagttaagcttttaaatacaaaaggcatttgttgcaaaaaatatataagaatatctaatttcatttaaaataatgttgatctaaaatactagattaaaaacaatatggaggggagttacagccacaagcccttttatttagaaagagggtagagatagtgattaaatgtcgactttatgctgtaataaattgtcaaggataaccactaatggagcatccacctgggaaacaatcaaagaatgataaaaggaacagttctcaatcagtacgcagtaaagcaagaaagaaggaaaacaaaacagaaaaatgtgagatgagcataaaataaaagaaaagatggtagaaaaatagaaatagaaaaaaatagatggtagaaaaataccagcggccgggcgtggtagctcatgccttaatcccagcactttgggaggccaaggcaggcagaccaggctgccaacaaggtgatacctggtctctaccacaaatacaaaaaaaaaaaaaaaaaaaaaaaacccaaaaaaaagtatccaggcttggtggtgggtgcctataatcccaactactcgggaggctgagacaggagaatcacttgaacccagggaacggaagttgcagtgagctgagatcatgccatttcactccagactgggtgaaagagcaaaactctgcctcaaaaaaaaaaaaaaaaaaggaaagaaaagaaaaagaaaaaaaaaatacatctgtagtcctagaactatttgctcaatacatttaatatataaatgtagaaattttcagaataaagcatcaaaattcaaaatacattgtttttaagaaatacataaagacacatatatcgaaaatggaaacagattttccgaaaaggattaatcaataaaaagcttagacacctaatttatttccagcaaaatagacattatggtcattatcattattaggcaaaaaatggagtaaaatataacagttctaaaacttgtacatacctggccgggcatggtggctcacgcctctaatcccagcactttgagaggccgaggtgggtggctcacctgaggtcaggagttcgagaccaatctgggcagcatggtgaaaccccgtctctgctaaaaatacaaaaattaaccagctgtggtggtgcacgcctgtagtcccagctgcttgggaggctgaggtgggagaattgcttgaatctgggaggcagaggttgcagtgagctgagattgcagtctccactccagcctgggttacggagtgagactctgtcaaaagaaacaaaaaaatctcgtacatacctgggaaaatacctttaaaacacgtaaagcaaaaatccacagaataacaagaagaaatacacaactatatcagcatggtgggagatttcataatgcctctttctttcaagacaccagacaaaagttagtgaagatagtgatgattaacagttgataaggtggatataaagactgtatagagaaccccaaatcagagtgtaaatttcatctgaagtacatggaaatgtcaatacatttcacatatttggtattattagggaaatactcttaaatttgtaacaagctagaatcaatagtaaaaacttgactaaagtaaataatttgtggatcaaagatgaattcaaaatggatggttaaaattcatagaaccgagtgataataaaaataaaaattaaaactaattggttcctgttaatttttgtagaagagacggaagggctgaaaactagtgagctaactgcccatctcaagaaaatagggaaaagtataataaatgcagagaaagtaaatggaaagagaagaattcaagagcagaaataaataaaaacaacatggaatcaataaaatttaaatgcccatattcatgttttaattagacaaatcaactgagagggaagtaaaaacaaatataaaatcttaaggatgaaaatgttataactacagttataatatatttttaaaatacagaaaatactaaaagctatgcaaataagtttagaaacttacatgaaatggatgaatttctaggagaatattgctacaaaaatgatggaaggggatatagaaagcctgaggagacagaaatttaatcacaaattaaaagtcttcctacaaagactatattagactgaaattattttacattcaaatttgaacacactttctaggaatagataattccagtcatcaacaaactcagtagaacatacaaggcaatatacatgtctggaaaatataaggttagaaaatttttttttttttttaccaaaatcagacaaaaatgaaacaggaaggaaaaccccatgccaatttcagtcataaattaataaggaaaagttctgaaacaaattattggccaactggatccaagtgtgtatgaaacagtgtttaagcttaatgttctccctttcctttctatattcactctttataatactttatgcagtgtcatggctttaaataaaatttacatgctaattattcccaaaatattatctctggcacagacttttgcccttaacttcagaccatatatccagccttctattgtgtatttttctctttggatatctcataggctactcaaacttaacatactcagatgacagctcctatcaaagctacccaacaccgttttctccacctctgttaatgccatctcattcctgaaatttctcataccaaaacttttaaaatgaactttgattcttgtctttctttaccagcctttctcttagcagatctgaaagatggtctcaacagatctagctgttgttttacttttatgttctgggtatatatgcaggtttgttatacaggtaaacagtgtgtcatggggggttggtgtacagattatttcatcacccaggtaataagcatactacctgataggtattttttctgatcctccccttcctcccattctctatcctcaagtaggacccagtgtctgttccctcattgtgtccatgtattctcattatttagctcccacttataagtgagaacatgtgatatttagttgtctgttcctgcattagtttgctaagtagaatggtctccagctccctccatgttcctgcaaaggacacgaactccttctttttgtggctgcgtagtgttccatggtgtatatgcaccacattttctttatctagtctaccatggagggcatttaggttgattctgtatctttgctattgtgaatagtgttgcaatgaacatatgtgtgcatgtgtctttgtggtagaacaatttgtattcctttggctatacacccggtaatggggttgctgtgttctgtttttagctctgccaaactgctttccacaagggctcaactaatttacacccccaccagcagtgtataaatgttctgttttctctgccatcccaacagcatctgttattttttgacattttaataatagccattttgactggtgcgagatggcatcttatcgtggttttaatgtgcacttctctaatggttggtgatattgagcattttttttcatattgttggccacatgtgtgtcgtcttgtgaaaaatgtgtgttcatgtcctttgcccatttttaatggagtagagtttttaaaataaatttgtttaagttacttagagattctggatgttaaacctttatcagattcacagtttgcaaaatatttctcccgttctgtagtttgtctgtttactctgttgacagagttcaacagaggaactctgtgaggaagttgtgtaatttaattaggtctcatttgtcagtgtttgcttttgttgcaattgcttttgacatcatcattacatcttttcccattcctatgtccaggatggtattgcctaggttatcctccagggtttttaaagttttgctttgacattttaagtctttcattcatcttgagttgatttttgtatatggtgtaaggttttattcttctgtatacggttagccagttatcccagcaccatttatggaatagggagtcctttcctcattgcttgcttttgtcggctttgtcgaagatcagaagggtataggtgtgtggcattatttctgggctttccattctgtttcattggtctatgtgactgtttttgtaccagtactgtgttgttttggttactgtagcactgtagtatagtttgaagtcagctaacatgatgcctccactagctgtatttctttgctccttctctcattaaatatagtctctgtgttccaaagtgaggaggaacaactgtgagattaagatttggtaaaagagaaaatgagcagggcaaatagagacaataaatctgtgatgatgaaaaaatgagaaagaaaggccagtaactgaaattgaatagtaatagggcagaaaagatgtgttgttgattttcaggataataaaaatttaagcatgtttgtagtataagggaagatccaatagaaagacataatatataagagcaaagtcttacaagataggatacacgagcaaaaaaaatggaaggattgactttggaagtgggaaagagaaaattgagataatacaaggaggttctgaggtggagagtagtaagtttgagaaagtttatccaccaaggataaatttatccctgagaagtaggtaactctgttttcaggttgtttaggactctgcacggtaaagggggttgggagaaaggagaactggtgtcattgaggaaatgagagtgaaaagtatttggaataggagctcttttgttttaaagattcgtttaaaatcaggagaagtgttagagaataatatcgtggactcagtagtagccaatgaagttattcgcaatggaaataatcagttatctgactttctcccgtaattttctgcaaaataattttatttagaaccacacacatacagccgcatagaaaatcaaaagcgaagggatttttctttgcgttatctttgattagcatctccaggttgtatttgattatattctgaaacaactaggattctagtctgaagtatcttcttccaactatattcatatttgcaagtcattcatctggttaccgccagtatgtcaaatgtgaatttcatgtatttttttttttttttttacaatctctctaacttaaccaatttaattcagatttttatgtcagtcttttagctgttggctgtttttcccaaaatgtcaggatcggctccataatttgggggactcagggaagaaagaaaatactgggtcccatactcaaaaattaagcattgtaagatggcaacagcagagcattaaaccaagcatgggctctcctaagcatgagttactgcataactgcacaggttgcatggctttgaagccaatttcgggtgtcatcttatacatttggttatttgtacacctgaaatgcttttgataaggtttgggagttaacaatttaggctcacttttatagattatcattacttgaaaatatttcattgaggataattaattaacaataaatgctttaatatttagaaaggtgaaatttaatcttattcttagtgtgttaataatggatatagcttctaggtttacatctttccatactttgaattcagggctttctttccttaagtagtaaaaaggatattggatatcttgaatcttgacttctcctaggttgaatgctctgcaaaaaacctttgtctttatataaaaattgcactgcaagcagactattatggcagacctctgtgttcaaggtgactgcaattttcagctgagtggtggactatgcaacttgttctcataataatattaattgaataaatggtcaagagtgattacattttgaggggaagaaacccacttgtgtaatatttacacatagataataaactcaatagcccagacctctttaatgtaagaaaaatagacatgaatgtgtatgctattttctttgtaaattagaaatttttccttctctatttcatgtatcttcttttgttatttgagaaagggatttttcttgtcctaccatcaattgtgtgagttaccttgattcttgtttttaataatattttaaaatacatcttgtattttaaatgtagttaccctctattttatagctacaggaactgaaagagtacatagccttcacaaaagggtctgtggtgaatgtgtttaattcttattttaatcaccatgaatcatggattttttctttgtaagtagtaattccattatttttagatataatttaccctacttcaatcaataatgtttccttggacagtcatatttacttttccgaaatattatataaaacagtagttaaatgtttttgttcgtctgtatgcctattatagaatattagcatttttggggtccagacacaaagggacacacaaacacatatatatacttgcatgtatttatatatacatgtatataagcacatatgtatacatataatcatgtactgcatttcaatatatgattaatatttaagtatttaatattcactctagacaaattatgtttgctcttggagggcattaatatctttgtgaatgagtgttaacatatccatttaatggtatcttgtcttcaaatatctcataatttgatagttgagttatttcttctgaagttggaatagcttttctacaagggcctaccaaaaaaaaaaaaaaagaataataaagttggaataacaaaagagggagttaatacataaaggaaaaccattaaggccgaaaaactaatcagttgtaaaagctaaatcagtagtatggattgataaagtagcattttagtgataaatttttggattgaagtttctcttttaagtttatcaatgtaccttttcagaaaaattcctcgagtttatatctttatgttaatgaaacttgtcaataactttaattatctatgatgattgacaactaatacttaatttctataacacacaatactgttctgagggtacatattcatctctctctttcatcttacgttttaccactctcaactttttaaaaccgttttctttgcaagctacttcatagattcttgagattgaataatcaaatctgttatttaatattcaggccaaatttctgaaaatgtttatttttttaaaaaaaatgataaatggaaaagggaatgttaaacaacatttctttgcagtgtattccagtgtccctagatggaatgaggaataaaaatatttttcaagttcatcatgctgtcttttaaatcataaaatgcatatatttattagtaatttttcattgaaagtatcaaagaaaattggagaatttccttactgtttctacctcactatgtttcgtatattctgaccagcattaataccaatttcatagcactctactgttcgctcttttttgctgtaagcccaactgattgcattttcttacctgttatttttcgttgttgttatttaagacatcttttctttctaacttcggtcttcatagaccttctcaatttcagctcatcaccaaaattacacagatagaagaatatagggactttggtgtacacatacccacttttgactccctctgattttctaatttagtagattttaattgaggctgagaactgtatttggaaaagttcattctgatgattattcaggtttgtgaaccccagtctagatagacctttatcagcacatgtataaggtgcactttgctaaggtgcattatgtgtcaggttcattcccactgtggaccagtaatttattcttgcccaaccactgctcatgacagatagatgatctctgtattccagaaatgaagctcctttccaattcctcaacaactaaaccaagcagaggaaaaagtggttttccttcacagccatagttccctgctgaagtagaatgaacgctttctaggaaactgcagcagatttttgatgacacggaaagggcatcactaggatcctcattatatattacctctctccctcacccgaaccacaatgttgacggaacagatacttcctgtggggaagatgctaagcagtcctgcatggctgtaggcattgtccacatcttaatcttcagctatatctgaggtatgacaagtttaacaatcctacaagttaaagcgtcacaccggaaacctgtttattcttctcccatgccaaataattccagcacgatgggtttcatctatagacgatgagaagatgccattgtggggtgaggacatagagaagagaggaagtttggaaccagtttatttctatttcagcaagcttaatgtattgtaagaacattttgtggcagatgaccctagtctgtaacaaggaatcgattgtaatgcatcattctgccagtgtttatctgttccctatgctcatataaacacacgagtcatctttctgcactcccaacctactcctaaagcactatacagaatgtttcgaaagcagaaggaaaagcagctgttccatacaccatgttcctgctgttcaaggtgcacatcccatccaaatgaatcatatcagagccaaagatcctggtaggagttcttttctacaaaactgcagtcttgtctatcctaacaacttggaggacaaaatattagaaaaccttgtaataaccttaggacacaataatgtagatactgactgagctagacctgaggactttttcaatgtagtgtggataagtaagatgacaggaagccataagcatactgtgccttgcacatcaacttctccagagccatgacaatcatctggagtatttgtgataaataaatattgttaatcttcatgtaattgggtaggatgaaaaaggaccagtcgtcccagacatcccaggagagaggagcatttttccagttgctcagatacaatttcaagttcgaaccaatatgaattacagttgaccacagaggccggcaaaatccatggcactgtagtccaagagaacctgaacactggccttagagtattatgagcctacatcacagtagaaggaatccagcagagatctctaatgcacatcagaaaagcaccatttctagttatcaaggctgtatttcacactgcttgactgaagattggaaactattttattcataggcaacctgtgtggccatccttacctggtctataaaaggaagtgtgatgaatttgcttcccatacatcatattaagtccagaaagccagagatgctgtgttgagtttctttcctgagagtctgaattcctaagtagagggactaacgagttccaaagttctttcactctgagatctttgtcacactactgtactgactggatatcactgaccttatttaagaggactatcaactggctagttcatctacattgtaaggactagtttgctcacaaccaccaacctatctgtaattggcctcagtatgctctctctcacttgggtacttctgtatttggctaattaacctataccacttggcttagaagcaccagctacattttttctaattttgacttctcatcttttccaacttgattttatccccagatttggacttttgtctcatgtataaactttatattttgcttgaacatgtggtctcaatgctgaccaagtcatccctagaatctgattctgtctcactattccatatcaggagacagcgacttaaatattttaattatttcctgtatcaataaattattcactgcctaaagtttagactttaataatatgaacacatgtgcagtcaaagagtacctcgccattgggccggaaaaatttcactgacttagggtggctcctgaaggtaccttgagaaagcttggatatgatgaatcctgtagacttattttatgtttactgaataatgcttcattcactttctttttgaagcttaaataaagcatcagtttgctcctgtcagggcagaagaccaatttcacttgtctacccatgaggataaatggatgcagcaagaatccagaaatgtcttagatatattactctatagctcattgaccattctatcaatgctcaatgctttacttgaaagtgatggctatctgatgtcaagttccattgataaaatgattcccaaacgttactttcaagtatgcttccttcagaggtcacagaagaacttcagtaacctgctaaaacctaaaacaggtgaagttcctattaaccatgacaccaagagttttcacatttatattctttcctggtaaagaaaattataggagctccatgctcacggcttttgagttttctcccaggtgtgttcaaacctagtgacattaacaaaacataaatctagaagcctttcgtgaataatgtaaccttctttattttatatttaaaggatatatatgcagacatgtacacatctttgtaattatttaccgcctatatccctattaaatacattaacaaatatgccacaggaaaaaccactgtaccaaagcccctcacaagagttatatttaaagtgggttaaagcaacatggttttaatttacttagtctttcttgtccaaggaacacagtgtgagacctcctttctttaggaaaaaataggatgaactaatttgaaaacaaagaaagcaacaaagtgaatcttgtgatgagctatgagcattggtaaattatttcttctgttgtaaattatcctcttctccctctgcttttctcttaatctccatttaattcccttttcaaaatcctaactctattctttttggaaaacatttcattaagctggtataagcatatctagacatctggaaatttttgtataacttttaaaggatctattacttaacaccatatgaaattatggaaaataaagtgttcctatctaatcaatctcaaagatttttcaagtgtacaatacaatgtgtgcttcaagtgtcagcttcttttttttttttttttttttttttttgagacagagtctcactctgtcacccagactgtagtgcaatggcacgatctcagctcactgccagctctacctcccgggttcacaccattctcctgcctcagcctcctgcgtagctgggactacaggcgcctgccaccatgccaggctaattttttgtatttttagtagaaacagggtttcaccgtgtcagccaggatggtttcgatctcctgaagtgtcaacttctttaaggctgtcatcttgccggttctaaacaactaaaaattgtaagaaccaatttctgagacaaatagaacattcttagtggtccttaaataattcctgatacttttatggcatgcttctttaaagaccttagaattatgcttcaggaatttaaattggttgttcagcaaagttaccaatcagtaggcaagttgttgcatttgacaggagcaatagttttcacgtggattatttatattcatgtatgttggtagacggatataaaacatgcaacttgcagttgcatgagacaaaagcatcaacatatctatcttagcttttcaatcatgtgatactactataatgctccatttttcacagatatttcttaagttctttatctcttcagacctcccgtaaaccattttctgtcttctgctggaccacattctagatgatctggatgtctatcattctcctttgcctttgctttatttgagtaagtgctgaattcgtggactgtgttagtagtttgatgcgtagtttcagccagatagatcagaaacatgaaatgcttttacatcatccaggtagatggcgccatgaatagatccctttgctttctggcctctgaggtaataaagacttaaatctaattgggttcagcttaaaatctcaatgtcatatttaatttaatatgcttccttgtttccagctcaagcttaagccatggtctaaaagactttctctggaaggcaagtgtggttagattccatcttacacctccactgcctctttttcttttttttttttttaactgcacttcagttatattattctccaatgtcttgggaagtaggagttaaggaaaataggcaaatgtctcctgttaactagctatttgtagctttgagtttatgatttgtgtgtgtgtgtgtgtgtgtgtaacagagatacaaagttcgggtttatttggggtacaagtatgggatctttaagaagtcttgcagaagctcttttgttttccccatctttaagaaggaaaatatgctctataaaaacatcttcaagcctcttgatcctgaggtactcttgctccataaagagtgttcctggtagatagctcaaacatggctgtcttcttccacgttcacttgacctattgagaaacgtttgccacaccaagcactggggagtacaggctgccccccttcttcactgtatcatttctcattcattttttacctatcaagtaggcatataatttctgaagcagacatcttcagaagcagagttggtaattaggtgtcatccctatctactctggactcccagaccctgtgatcagtggtcttggagctccacttacttgcatgggacaaaaaggttgaagtaccatcttcttttcccccttacggaataaacagagggagccatccctactctccctctgggccatgaattcagaagaccgattctttctaaaaccttcagagagttttagtataagtgggtatggtggagcaacaaaggcagggccagttttcccagctcttttgtaagccctttgctatgccctgctatttccatctcttagaatgagagagacttattacttgttattttcagtttaagactatacccaaaattctaagacaacagatagaattcaatgcattcatatccatagtgacagtttcacacttgctcttaagttaaatagaagagttaggtcaggaggaaatagtttatcaaaaatgatatacacccaccagtattcttagtacttggcacttgaacaaattgcaacctgttagtaggtaaaaaagaaacactaaaaggaaatagttggaccactgaactattgcttgatccactgaagcaagtgttgcttggtccactgaagttgagactctgggaaagaaaacttgactggtaaactctgtgaagtgaagcgtggttgtcaaatggagattaatgtcctctcatgggtctccactgtagtttctgaagggcaggttgagtaggatttggttttagcacatctcttgcaggactcctatcccaagacactttctataaaataaaacatattccatattgctctactttctgcaaggtacggacagtcaggttggggccaattaatgcactaccctaagcagaaacttcaagactttgtcgttgctttgctttatttgaattggaatttgggatttagttttcgttagttcatttactactaaaatcactcataaaaatgagggctttattttgacattggcaaaaatccttctttactcagaagaaaatatttaaaactgctggaaattgaaatgttttacatgtctacatcacaatgatgaatacaatgatgagtatttaaacaccaaaaataaaagtgtcttattacgagatgattgtaaacagtgcacccacattcttaatccatttgcaagcataagcttacccatcacctcataaatgcagtaaaattgctttttgtattgagtttaataagtatagtataggatacctagctcctttaatgaatgtgttttttgtaaaatattattaaatgattttttttctaatttggctttttaaagcatgcattcatatgttaaatacattttttggtttcaatattcggttttttatttcacatgcagagttttctcttccagagtttcttagacatgctacactttgatttatgtgtttgtaatattgtggtacaaaggttagtacattatttttaaaatggaaatgtgagaaactgtcaattcattgtagagatgactttacattgccagcaaaactcattaaactcttaaaactttttcttaaacttattttatatttccatagtactttaaagatataaaataattaatttgtgttaacttttacttagttttaattttcattgaaaactgggttaaaatatattatgtgtttttcttggtaaccattactaggattgttttctatttttatatttttgtcattgatcgccagttattaaaagatgtctttctaactttccttatatttgctgtttctgtctagctatataattcctcttactgctaagtggattagctaaagacatgaaataacattttaaaacaacagcggaacagtattctggaacaacaacaaaaaatcagattatggttgaagactttctacaaacttcattcaatgagacagcacaggtcaagcgggcagaaagtcagaaaattcataagcctgacattccatcagggtgcgcctaatcagatgtttagaaatagaaggcagcttatgccatgactagttgaaagaattctgcaagcttgcattgacatgaggtcttttcaatgactgagataatcaaggaatctgtgtaaatcagcctctcttattgactgtcaggccaggaaaagagccaacccacccgaagtcaactctgccatcatttcttaagccacactgttcctttcagctcatagaatctcatgaatagaaaaagttaggtttctaaaaagaattttgaggctagatatgtggtttaatgttattctatattacatcctatacaattaaaatctacagatgtgccttgtagagtacactgtttttgcctttagccagaggaaggaccaaatttaatacctggctaggcaattattacacgctgtgattggaagttttctccaaccacctgtcacaatgctgaaattttatcactagagatccatttctttggaagagctgtgggtaggctgcagccagtctcctctgcaatagaggctctgattatagccctgaacactgttatctgaaatagtaaattacctgatgtaaattttagttgaaattttgactgagaacaaaaggaagctatgtttgaattggaatatagggcaaagcctcggtcaccaatcttggatacagaattttaatagaaagagattaaaattttctccaaataatgtcccacccccattctgacacttttaatacaaaaacagatagatttattgtccaaaagatacatctctgagcagtggtgacctttgtttacaatttcttctgtaaatccattttcgtctttgactatttaaagttttctgtttttctcattaaaatttctccttatacttttcacccagtcataaataaagctattgggcttcattctaggaactggtattgagcaatgaacaggacagccgtaatccttgaactcattagagttgatagtctaaagtaaatgcagaccattaatgggagattaaatatgttatggcacatacaaagtgcaagaaagaacataatgtcatgtgagggaatgcataaatagcttaatttagccatcccgtaacatattcatatattaaaacatcatgttacgtgctctaacttgatagaatttttacttgtcaaatcaaaaaaatacaaaattcaaagaacatgcaagaattacctccctgaacttagaaggtgccagaggtagccacttggaagagatgtccactacattaagaagataaatgtaaattagccaataaaaggaagtcagaattgagattatgccagtaaaagggaacaacatgtttaaggccaagaatcaagagggccacagtgtaggttgggaaataaaaaataaaatttctgtatagctagagcagggagtaaaagacaccagcaggacttatattatgaagggacttttaagccacattaaggataaagcttttggctgcgcgcaatgtctcacgcctataatcccagcacttagggaggccgaggtgggtggatcatcttaggtcaggagtttgagaccagcctgggcaaattggtgaaaccctgtctctactaaaaatacaaaaattcgccaggcatggtggcaggtacctgtaatcccagctacttgagaggctgaggcaggagaatcacttgaaccagggaggcagaggttgcagtgagcagagattgtgccactgcactccagtctgggtgacagagagagactccgcctccatctcaaaaaaaaaaaaaaaaaaaaaagaatagagcttttatttgaaggacagtaaagaatcactagagaattttagacaggaagccccaattcgttattgagagaacacattgcagctgctttacaggtgggatgtggcagagtaaaatgccagtgaagaaactgatagcatatttgaggtaagatatagtaatgattttaactagagtaaagacaatggagagagagagaaaagattggaatcaagaactatttagaaggtataataaataattagtgattgactgattagatgcaacatgatgaaggacatgatagaggaagtagaaatatctagaattacatctaataaagggaatcattatttgtttttcgctgaaaccggaaaaaatacagagaaggaggaaaagcaagttggggagttgagaagtaggtgagaagagtatatgcaaggagttcatgtgtgggagtgttagcttttggtggttgcagaatattcatgaggagatgtccaatagggtgagataacatgcaagtatggagatcaaggggagatctggacttgagagatgtagagttgagagttgtcagaatgtgaggaggaattgaagttaaggtatgggtagaatgagaagaaaggaaagcccaggataaaatcttaatggagtcaaaatttatggtacagggagaagtactgggaaagccttccctcttcctgcagcatcactaaacttcctgttcttttgccttagtctagatgcctttaactgtagttttacttgggcaaagctgtgttataggctggcttcactgaagaataatgacatcactaatatttttaaagcttaaaaagtatagtatttatgtaatatctaatattctatatataatataaaaaccaagatcatcttaaaacctcagtcatgctctgtgggaaagaaagttatattgtacctgataatcatgcctttacattgtatattaaggaaatgtattttaaatgacacataatgaattcccaataagttgcctgccctatttcttacttttacaactactctgttaaaagtgaacagatccttgaagggagactttccaatctgtgcagcatggtatttatacttgaacattattgaattatcctaatcatacttatagttacaatcaagattaattgcagctatattaggattacttattattttttctacttcagcagtaacataaacccaattgtacaaacaatttctgtaatccaaattgtgaaagaaagtagggagaaaaaagatcatgcaaagctggttgaaatagtattcaaaataaatctttaaccagactgttatctaaaattctgtttttgacaaggagctgattctgaacagattgtacatgtatctcactggtggaagcagattatctgtcttgaattggattgtgatgacgatgaccctattctaagcaaaccaaatctcttgaactatataatgagatcaggaggaacattcgacctgagaaagacagattgcaatgactgagatgattttgctaattttttttccagcctatttccttaatgtacgtgatattgtgattgattttcatgcagagatccctgatcctatagttttgtttgctatttatttttctccttcacattttttttctatcaacagagctgaatgagtgccaggaagctgcgaaatctgtcttacaaaaaggtgattgtggaagagtctagaatcttcatttattgttcagcaggattacagaaaagctatcaagagtaaacatttaactgatacactcttattccttctttttaggctgtaaggaggcaaaagttgcttgaacagagcatccagtctgcccaggagactgaaaaatccttacacttaatccaggagtccctcacattcattgacaagcagttggcagcttatattgcagacaaggtggacgcagctcaaatgcctcaggaagcccaggcaagtacatctgggaatcagcttccattcttttgtttttattacttcaacaaaatgttgcagtgtttctaactttaaatttattcaactagttttccatggggttgttttgattcactgatttgactatttggaggtaggtaggaagaaaagggggtctagatcattagtctaagatttatttttttaaggatgtaatggaggaatttgaaataaagacatttcaaagacaggagcaatacgttctggtgtttctgacttcaaactatactaaaagctagagtaaaaccataggatagtaaatggtaaagaaaatgttttttggccgggtgtggtggctcacacctgtaatcccagccctttgggatgctgaggcccacgaatcacaatgtcaggagttcaagaccagcctggccaacatggtgaaaccctgtctctactaaaaatacaaaaattagccaggtttgttggcacgcgcctgtaatcccagctactcgggaggctgaggcaggagaatcacttgaacacgggaggcggaggttgcagtgagccgagattgcaccactgtactccagcctggaacagagcgagactctatcttataaaaagaaaaaaagaaaatattttctatggcattgttggaaagcagtctcaaacattttattataaactcctcgtttagtcacatggtctatattgttttataaaaatgtgttagttacaagcagtgagtaacacaaaattatcgatataaatttacacctcaattattaatgatcatgctcaatatagctacatgcactcactcccatgcttcattcaaacgaaaatataaaacgtgtttacctgtttttctagaatgagaattaaaatagtgttgaaaataaatctgagttgacttttaaatgagtaaattttaggccataactaaatttacattcactgtaagaagtatttttaaaatgctgttctcattttttaattaacatttaaacatatgtgaagttatcataggtattatttattcaaaagtctttagggttgtgtgatcgcaattactagatctgcttttcaaatcttatatacatgttgtgaacccaatcaccaagtccatgctatgatgagaggagcactagaaggttagctgcaaatctcaaagccttctccctgccagttggtgaagatgtctgaagtttttcactttaaaatgaatttgggggtgatatattagatttgtagatcatggttacaatgcaattacagttaatgaatcaccgttaataggtgttctgggcaacagtatacacaatagcatgagttaatttaccatattgtctaactttgaccaagaatgtccctgataatatgtggcagagtataggtagttttgataggcttaaaaagtccagggaatattatttccttatggagtgcatacaattgcaatagtggatgaagaaagagaattttggggagaatcctgatgataaaatcctcatcatagttttccactgggcaacaagagtaaatattgtagtagaagtgagggataatagtaaacatacttgaggattcaatttttaatttgtcttgatatataatgattgtacatattttagagggtaagtgtgataggtttatacaaacctactccagtatatatatttttcaaacttacacaagccaggttctctagaattaactattcctaagtccgtcccagtttgagtcataatgaaaaaggttttttgatataaaatatttatacatatttatggatacaacatttatgtaatattttcttacatgtatagaaagtgtaatgatcaagtcagggtatttagtgtgtctaccacggcagggtttagtaaaatgcatgataggaatgagtaattgtttctgaattgagaagaactacatgactataaatgaaatacagagtagaactgctttcatttaaactaatgacatgagttttgaaggaatgtttgattaaaaatgcttgtgacgttctgaatggaattaaggaaaaatttgagcagtatgaatactagacattaatattgcaagtttgtacttcaaaatgcataaagaattactttgtgacagacttgcggaatgaaattatgagtagcaaatttgataggcaaagctattatactattgtctttcaaggaaaattggagcttttagggcgaagcatctttagttgaacaggttgtgataaggggcactgtgtgttttttcttatttagaaatggattcaggattttataaacattacttgtttttaatagcaaaatattttgcttggtttttctaaaaaaatactacaataaaaatgttattaactacatcagtagaaaagtactagtaaacagcagaacacagataaattatgaaatttcagatctacttcaagaaagagattttgggcattcagatcaaatctattttccatgcatttcaggtcacacctgcattatcaacatagttcttgacattgagtctccccaatggtaatacataatattggagaatacaagccatctgaaagctcttaaaacattcttctgctccagggttttattttaatatggcagtaagtgaattgttttctagaacagagttctcaggtactcagatttgcttcaaggattatatttcctgaaaagcagctcgaaattcccatgaaataaaatagagagtcaaaagttagatagtgaaataacataagcacagtgtgtaagatgaaggatccactaagaatgccaccaaaatgacattttaaatatagagatggggtggatagatggatggatgtatggattgatggatggatagatagatagatagatagatagatagatagatagatagatagatgaaagaaagaaaagaaaggaatagaatagggactaacttcaatgcattgtattaacaaaaatgtgtttctataaatttgcacttaaagataaaaaggttattgctaattaaaatattagtgcactataatttcttttctcataaatggtatatttagcttaattcatcacggagaagcaggaaaaaatgtatgaagttaccatattaagtcctctttgaaatacctgctcagattttctgtcatatactggtcacgcagatttgtgggtgtctgactccaccgtgtggtgcactgagagttttgctagttaatttgaatcttttagagcattattttttctgcattttaagatcgtttgagatcctcagatataaaagctatggcactaaggaaatgcatactgtatgtacaactttctgacaaccatactcttgttatatataaaagtagatgtagatcaggatgcttctttacattcacattggcatttattactataggaaagaaaagagctgctcacttccttagtgtgttaattgatcagttatttctctgggccctcagattctgaattggatttaaaattatgttacttattttagtgacatgagcttacctacagaagcaaagcttacacttttagaaaataaagctgcatgctgccaggatgtaacagcatgtgttgacctaggagtattttatttcaaaagataacacttagccaattcacagtctttttttttaatactttaagttttagggtacatgtgcacaacgtgcaggttagttgcatatgtatacatgtgccatgttggtgtgctacacccattaactcgtcatttaacattaggtatatctcctaatgctatccctcccccctccccccaccccacaacattccctggtgtgtgatgttccccttcctgtgtccatgtgttctcattgttcaattcccacctatgagtgagaacatgcggtgtttggttttttgtccttgcgatagtttgctgagaatgatggtttccagcttcatccatgtccctacaaaggacatgaactcatccttttttatggctgcatagtattccaaggtgtatatgtgccacattttctaaatccattgtatcattgtgagacatttgggttggttccaagtctttgctattgagaatagtgccgcaataaacatacgtgtgcatgtgtctttatagcagcatgatttataatcctttgggtatatacccagtaacgggatggctgggtcaaatggtatttctagttctagatccctgaggaatcgccacagtgacttccacaatggttgaactagtttacagtcccaccaacagtgtaaaagtgttcctatttctccacatcctctccagcacctgttgtttcctgactttttaatgatcgccattctaactggtgtgagatggtatctcgttgttttgatttgcatttctctgatggccagtgatgatgagcatttttttatgtgtcttttggctgcataaatgtcttcttttgagaagtgtctgttcatatccttcacccacttgttgatggggttgtttgcttttttcttgtacatttgtttgagttcattgtagattctggatattagccctttgtcagaggagtaggttgcgaaaatcttctcccattctgtaggttgcctgttcactctgatggtagtttcttttgctgtgcagaagctctttagtttaattagatcccatttgtcaattttggcttttgttgccattgcttttgttgttttcgtcatgaagtccttgcccgtgcctatgtcctgaatggtaatgcctaggttttcttctagggtttttatggttttaagtctaacatgtaagtctttaatccatcttgagttaatttttgtataaggtgtaaggaagggatccagtttcagctttctacatatggctagccagttttcccagcaccatttattaaatagggaatcgtttccccatttcttgtttttgtgaggtttgtcaaagatcagatagttgtagatatgtggcattatttatgagggctttgttctgttccattgatctatatctctgttttggtaccagtaccatgctgttttggttactgtagccttgtaatatacagaaaaagagaattttagaccaatatccctgatgaacatcgatgcaaaaatcctcaataaaatactggcaaaccgaatccagcagcacatcaaaaagcttatgcaccatgaccaagtgggcttcatccctgggatgcaaggctggttcaatatatgcaaatcaataaacgtaatccagcatataaacagaaccaatcacaaataccacatgattatctcaatagatccagaaaaggcctttgacaatattcaactacccctcatgctaaaaattctcaataaattaggtattgatgggacaaatctcaaaataataagagctatctatgatgaacccacagccaatatcatactgaatgggcaaaaactggaagcattccctttgaaaactggcacaagacaggggtgccctctctcactgctcctattcaacatactgttggaagttctggccagggcaattaggcaggagaaggaaataaagggtattcaatcaggaaaagaggaagtcaaattgttcctgtttgcagatgacatgattgtatatctagaaaaccccattgtctcagcccaaaatctccttaagctgataagcaacttcagcaaagtctcagcatgcaaaatcaatgtgcaaaaatcacaagcattcttatacaccaataacagacaaacagagagccaaatcatgagtgaactcccattcgcaattgcttcaaagagaataaaatacctaggaatccaacttacaagggatgtgaaggacctcttcaaggagaactacaaaccactgctcaatgaaataaaagaggatacaaacaaatggaagaacattccatgctcatgggtaggaagtgtcaatatcgtgaaaatggccatactgcccaaggtaatttatagattcaatgccatccccatcaagctaccaatgcctttcttcagagaattggaaaaaactactttaaagttcatatggaaccataaaggagcctgcatcgccaagtcaatcctaagccaaaagaataaagctggagtcatcatgctacctgacttcaaagtatactacaaggctacagtaaccaaaacagcatggtactggtaccacagtcttaaattaaattatatggccacagcatcaatctacccagtgtcagctcatttaatgagagattttattaaagtacaaaattaagaaaagatttattgaaacagaataaagcaaatggggaaaactcttctagatatggaaatatatcttagaaaacagaaactaggattatttccaaagtactatgattaaaaatgtaacaacctatgcgtgttccttggaaataaataaaaaattaaatcacgaaattgtgtgactgcaaagaaacacatggaacaaatttagtcatttactgttcaatttttcagaactatatattgaagcacagagtttagttttggcacctaaaatcctatagcaacagtctaagtaaccatgctgagccccggagcaatcaaatcaaatctttaggtggatttggtcttcagaatttttggaaacttttttattcattctaatgtgtagctaattggagaatggctttggatggttccctactagtaatgactaaattgttccagagtatttttcatacgacattttctatcactcttctataaagattctcttctatgactgtgtcaacgtttcaatgggagggagtcagagtggcaatcaaactactggtgagattctctcctattttgattttttcctctaatggaaaatgggtgatggaagaaaatatagctgagagctatcgcacaaattttaatttagacaaaaagaatgttcaatatagatgtttgaggctgaactctgcttggctttcttcaattcatttttttctaaccccatttgttaacatgtcaattaacttgcatatggctcttaatcattttaggggacagtgacaactatgtttaaatagctacttaaatgtcttgcaatttttaaaattacaaagatactttcacatacatgatttttttccttttctactaattttagttttgaatctttgatatgtaagaacaacccaacatgggcacctgttgaaagtcaccatgtccttatgtgttgatgcacattttgtaggggaaaacatggccctgttgcttaaattactgcaagcaagagcggagttgcttagcagtggctccagtagctttactgttctatttgttttttcccaaagaattctgatctcatttttttgtaacctcgtgtcccacatagtagatttatgagcaggaatagaggaaggaaacaaattaccttcaaagaagagtgcctcataattaaatattgaaaaatactgccgtggtttgctcaccaagctaggacgtcaggtgttccagagtccactacagaccagacttcctccttctctttttccctcccattaacaatgtgagtacaatttagaaaagaggggatttttaaagcaaagaaagctattaatttaaactaattacgttaaatgcactttaagaagaattcgtaattgcaatcttcccgtgtttatcaaagaagctaaatcttataactcacattaaatataatcggtcatctttaaatgttaacattccaagctatcaaaatcaatggcttaaaaataaagatataactgcagattttggtctatcagattgagcttttgatttcattaaggaataaaacagactcttatagtgtaaataggcatatttgattgccaaacgacttggaacagtgtaactttacagtctgctttattgatttatgagttagacagcagaaacctgcaaaggggaatttatgtggtaattggataatttagtcaaagaagaaaaaaatggagaactaacccagagatttgggttcaaatattaaaacctatctagccatagatgtagactttttattttctttttacacagcccagtagatggtaaacctagtgcatttaattttgaatctgttctaacattgaaaggccacccctatgtgttgctatacagaacttattactctccatttaagaataacttgttagtttcatatgtttaatagtgtgggaaacagtcataaacacaagttgtaggaaatgtaaaatactagaaacttgccacacgtcactgactgtacttggacaacctgtacattattatgtcctcactggctatatgataaagatatagatttctttcatattattttgatgtgtacattttaagactgcaattaaactatagtatgcttttgtaaaaatctatctacaaattctacatataaggatgaaattattaaaattaatggcaaaaactgcaattacttttgcaccagtctaataacttcacgctacagccacagtgaacactattgcaacactctgaatattttgaagtgatccaaatttatcctattatttcccaattttgtcttatgcaaatgaatatttacttcaaagatagcacacagaaaatttatcgatctaaaatgcacagccagataacacttagcataacatactatgttttatttttctttcagcgtttatcgtgattgttaaatcttttatttgctttttaaaaattttccccgtctattcccattctctaaccactaaagttcagctgtaagaccgtgggccacccagcagatttctaacaaatagctggcaaatttattgaattccactgaggtttagtcactaagtatgtgtcagacaaatgtgataggcagtgtaaaatttaaaatgtgaataagcctaacgtggtccttgccatcttgccactcattagatagcaccaaagaaagataaaatttagaaattgctggccacttacgtttaccataatagtgaagaaccatttttccaatggaacttaatagtatcataaagacttcttgtcataatgccttatgattgcccaactttgaagctctgaaaacctttccaaaatactttgaatagtataaaatggaactcttcacatgaaaaggaaagactgatggaaaatatatattttagcctctttatgtattacctagtttttaaggattataccatgtgaatatctaatattttgaaagcattcacgttatttggtaattacagcagcctaatgaagtataaaagttgtgtttaaaagggaatatttgaaaacactagatgaatggttgaggcatgggttgagaacaggatgtgaatgaaaatggacacacaggtttaggggttaataaaaaatgtcctaaagttggattgtggtgatatatacatgactctataaatttcctattgttcattgactatatgtttaaaatgaaaattttatggtatgtaaattgtacctcaaagttgtttttaaaaccctattgaatagagaatatatcaattactattatatatttaaaaagataatttaaggttaccatcaactttttcactccattattttgatgcatagcaaagggtgaaatgtgatgaatgttgttaaataacctggaattaacttaaatggtagatatttattgatggcctactgatgtccgcaagatcttacatagtaatatcataatgttcccattgtttacattctattccatttaatgaattttaatgctaaagcatttttactgaagctgatattttaactcagatctgctttctccactttaataattagccctttattaagtgaaaattaacctagaagtacaatctcccaattatttctaggcagcattccaaaatgttccctagagtttgatttactcatttatctattttgaaaagtaaccataattacttgaaaatacgttatttctattttcaatgtttgtaggcacgtagtagatgtataaacgttacatgagatattttgatacaggcatgcaatgcgtagcaatcaaatcagggtaaatggggtgtctatcaccttaagcatctatcctttgtgatataaaaaattcagttgtactcttttagtttattttaaaatgtagactcaaattacttttttattatggtcatcctgttctagcaaatactaggtcttgctcattatttctaatttttgtacccattaaccatccccacttcctccccaacccctgactacccttcccagcctctagtaaggatccttctactctctatctccatagttcaattatcttaatttttagctcccacaaataactgagaacatgggatgtttgtctttctgtgactggcttatttcacttaacgtaataacgtacaattccatccatgttattgcaaatgacaggacgtcattctttttatggctgaatagtactgtattgtgtataggtaccatattttcttttttttattattatactttaagttttagggtacatgtgcacattgtgcaggttagtcacatatgtatacatgtgccatgctggtgcgctgcacccactaactcgtcatctagcattaggtatatctcccaatgctatccctcccccctccccccaccccacaacagtccccggtgtgtgatgttccccttcctgtgtccatgtgctctcattgttcaattcccacctatgagtgagaacatgcagtgtttggttttttgtccttgagatagtttgctgagaatggtggtttccagcttcatccatgtccctacaaaggacatgaactcatccttttttatggctgcatagtattccaaggtgtatatgtgccacattttctaaatccattgtatcattgtgagacatttgggttggttccaagtctttgctattgtgaatagtgccgcaataaacatacgtgtgcatgtgtctttatagcagcatgatttatagtcctttgggtatatacccagtaatgggatggctgggtcaaatggtatttctagttctagatccctgaggaatcgccacactgacttccacaatggttgaaccagtttacagtcccaccaacagtgtaaaagtgttcctatttctccacatcctctccagcacctgttgtttcctgacttttgaatgattgccattctaactggtgtgagatggtatctcattgtggttttgatttgcatttctctgatggccagtgatgatgagcattttttcatgtgttttttggctgcagaggtacaaggaggaactgataccattccttctgaaactattccaatccatagaaaaagagggaatcctccctaactcattttatgaggccagcatcattctgataccaaagccgggcagagacacaaccaaaaaagagaattttagaccattatccttgatgaacattgatgaaaaaatcctcaataaaatacttgcaaaacgaatccagcagcacatcaaaaagcttatccaccatgatcaagtgggcttcatccttgggatgcaaggctggttcaatatatgcaaatcaataaatgtaatccagcatctaaacagagccaaagacaaaaaccacatgattatctcaatagatgcagaaaaagcctttgacaaaattcaacaacgcttcatgctaaaaattctcaataaattaggtattgatgggacgtatttcaaaataataagagctatctatgacaaacccacagccaatatcatactgaatgggcaaaaaccggaagcattccctttgaaaactggcacaagacagggatgccctctctcaccactcctattcaacatagtgttggaagttctggccagggcaattaggcaggagaaggaaataaagggtgttcaatcaggaaaagaggaagtcaaattgtccctgtttgcagatgacatgattgtatatctagaaaaccatattttctttatccattcgttttttaatggacatttaggttgcttccaaatcttgacttttgtgaacagtgccgcaataaaacacgggagtacagatatttcttcagtgtactgattttctttcttttgggtatatacacagcagtgggattgctggattgtatggtagctctgtttacagttttttgaggaatctcaaaacttgttttccatagtggttgtactagtttacattcctaccagcagtgtatgagggttcccttttctccatatcctcgccaacatttgttattgcttgttttataaataaaaccatttgagttgaagtgagattatatctcactgtggttttgatttactattctgttatgatcagtgatattgagacccttttcatatacccgtttgtcatttatcttctttcaaaaaaaagtctattcagatattttgcccatttttaatcagattattagttttttcctatagagttgtttgagctctttatatattctagttattgatcccttgtcagatgggtagtttggaaatattttctcccattccatgggttgtctcttcactttgtgggttgtatgctttgttgtgaagaagatttttaacttggtgtgttaccatttgtccatttttgctttggttgcctgtgcttgtgtggtatggttcaagaatttcttgcctagaccaatgttctggaggtttctcccaaagttttcttgtggtagtttcataatttgaggtcttagatttaagtatttaatccattttgatttgatttctgtatacggttcaagatagaggtctggttttattctgcatttggatatccaattttcccagcaccatttattgaaggactcctttccccaaagtgtgttcttggcactttgtcaaaaattaggtccctgtagatgtatggatttatctctgtgttctctattctgttctattgggctgtgtgtttgcgcttaagccagtaccatgctgtttcggttactatagctgtgtagtataatttaaagttaggtaaagtgattcctccagtttcattcttttttgcttaggatatatttggctattctgggtctgctgcagttccatataaattttaagattgttttttctatttctgtgaagaatgtctttgttagaaaatacattattataatgaactcttctattatcgttgtcgttattatgactaagcgtaacatcgtttctcaggtatattacaagtaataattatacacaatgtccaattttttatttttaaacggttctgtggtcaagattacgcagaaaaatttatatgctttacttctctgctggagatttttgacccacttttttgtattttcaaaaataaaagtttaacctaaatttgataagaagccacagacactttttcctccagaaatatgttgatataccacaaaactcatatgtcaaggaacaatgtaggggagacactgaaatagactgtttcctttggcctattgcatatttctgataaaagtcaaaacttctttagctgacaaaatttaatttaaaggtaatatttttctaagtaactctacttgggggggggggtttaaaaaaagagtagtacaaagctgtgtgaatttcttctttttttacttgttgaattattataaagtataacctgaaacttttcaacattttttttctatgaaaataattatatttcttgcattttcctatctttggaaagtacatatcatcccaaatcttttgatatattttgtttctttcgttttctaagtacgtgtgatatgtggccatttccctttcttgaaaatagcaatttcaaaattactggctctttcaaaattactaatctaacagtggtacgttcctccatcaatcagtagtctcaacatgaagtattttaatatcttttactaaaatattttcttattttctctaaatttttcctttctttgacaccacagaaactccaataattatttgatatcattttcttcattctgttaagtactttagcctgctgcagtataattttgctggccattttctgttactatatatatgagaatggtttgatgaggtaaagcaagattttaaaaacagccctgctctctgctcagttaactgtaaagtcctatatttaaaatgtgattaatgtttgaatgattttttggttctataattttgccctttaccatattcaatggaaaaatggttaattcgatttcacttgttttattttcctactttgaatatatagtgctgtgaacatagttactgcatgctcaaatgccttttttataatggaatgttgagataagctcaaatgtcttttttaatataatggaaagatgatataatttgctttatattacttgactttgatgaagaaaatctagtgattctgaaaggtactggattgagaacacctcatagagcatatgtgagtgttcacatcagtatccgtgatttgctatgtcctctcactttgtttccattagagtttactgattttatacgaagccaggctgataatttcacaagaatagttgtatgtggttggcttatttgttttcttcaaatgcttactatccatatccccctagatgtatatattaggtgaaaatataactcaaattatacatccctcacatctttaggacaacttagaaatctagtagacaagtagagagatcattttccttcagattgaatcttctatccccaatgttttcttccacaattttattttctttcatcatattctcataatgtcaaaaaagaaaatgattacattgtctttttttatgagtgatttttacataggagattgttcttcccagaagtttcaataatattctgttatttgtacaagttacttttctatttcacaataagcctgcgctaaagtgctaagcattttttacttatgtggttccagaatacagttctgacgaggttaggtaaagtagctggtaaaagatatcctaagtacaagctaaaagttaattacaatttaaatgtaaattttgtggaattaatgtgtaaagatgctggcaaatatgtgtcatgcatgttttacagcttacccatagtagaatcaattggaaatataaagacattttattttataattttagtaatgaattgaattattattaatgaatatgttaagtatatttgatagcctttttccaaatctacttgtatgatgcactctggcaaaaaaaagcaaaaggataacatctacaaagtgttgtatgattcttggatatacacaatatatattaataaatattctgagaagttctgtggtatagacacatgttcatcttcaatttccaaaatatgtttaaccactgagttctttttaatgcataatctactcaatgcataaagaaaattttatctctaatcatattggaacagtactacaaatatgcgaatttcactagaaatgcctatacattatgataaaagtctcacttttatatgatgttcaatgatgatttttttcaatgttaataattttagtggtggcgacctttctaaaaacacagaagctcatcctcaacagtttttctaactatttaatggaaatatgtatatttcaaattccatggaatgctttgccttgagctccaaattgcccaacattcctctcacaggttacttggtccttcatgtcccctgccaacagataaaagtcgagtgtttggttatatgtaagctgttgttgttcctattatttatgacttatgacaacaatatgactcatttgggaaaatgtggaacttatcaggaaggcctgtgttgcagtgatcacttacgctatctttgctttgctttgtaatgctgagcttctagaatttccaggggcagtctttgaaaaaaaaaattataaatagaaaattaaatgctggtttatagaagggtctcttgcaagtgagaggcactgaaacttaaggttctgtagcttcatactaattcctcatctagatagtaattcttactaactcacattcagtctttcctcccattaaattaagcacacacactctgcatgccccaagcctaatctttgctagcttgtttcctacagcctaaaataagatcctatattcttattctctgaccctccaaaaccctttctcagccatatgctagttaaatcatgtaaatttcctaaaaatcaccagattatacagcagatattaatatttatctttctgatcacagagcatgggtttttctgtttttaaaatttttttaaattatactttaagttctagggtacgtgtgcacaacatgcaggtttgttacgtatgtatccatgtgacatgttggtgtgctgcacccattaacttgtcagttacattaggtatatctcctaatgctatccctcccccctccccccaccccacgacaggccctggtgtgtgatgttagtttttctattacattgcatatatttctgctttgtaatttacttatatatctacagtctgcctcttaaaataaggcttctgtaagtataggggcaacaattttgttctcactgtgtggaattgagtagtagaagctgaacgatttgttgaattaaattgactaaatgctatcaacatacgaataagattaaatttctttttttctcacaaatgtccatttggaggatacttttattttaaaatcataattaaagaggcagtataattgttagagggcagcaagtttgttacttcctagttatgttaccttgggcatgttgatgtttctaccttcatttgtacatgaagatgataaatacttatgttaatatgattaggagatggaattaattatataaagtgttagcacataagttcccacaaatatctgtggtggtgaggatactgatgatgatttcttttctttttttttttttttttgtttttttgttttttgctcttctttgaccactctggtataaaaggttaaaggactatgtgtatacttcattttttcctctactaaccttggaggctaaggggatggaaaaacttttaaatacatgtacacagatatgattacagatgtataatttgggccctctaccctctctgagtgtattcttatttttttaaatcagtttcctttcacagtctccacaattgctattgaacttttatcactttgatttaaattccaccttgattctctcctctcatcctcagcagatacctagggttttgtgcttacgaggaaatgacatgttatatcgctgataacttataactaaatatttgtgcaaataacatggacaggtatttttacatatactgtcacatctgatctttttgaccaaaaccaatgtagttgactactgaagaaatgagaatttctcagataagaaaacttcattgctggcttgctattatcattcttgggctagacatgagaaaatcaaggttcagaacatgttgatgctttgcccaaggtggcaagagagagccctgaaatttaaatcctggttactgttaacatgatttcaccctgatactctgagagcaccatgtaggaagcattcaacttcttgcgtcttcacatcttacttttgttttctgaaaaagagccacctctcctcctgttgatattttccgttggccctgagctttgtgcttcactctggttttcttgctttaaacaggtttttttaaaatcaagtttatcttcttacatttaaaaaaaatcactttatgtgttggcttctttcatgtagccttaaagtatgttcaagtctgattgacctgaattttattatgtgtggagacaaaagtctgcaaaagtaatttaaactatttttattagagtgctccttgatccttaatcaggccagcccttgaaaatacgatttctgctctcgtcatccacttctctcttctagctgcaatggtcattgacgagctcatgtaccctgattactattgatcccattgaacctatctcaaactgtcactgttgacctctctctctcattcttaaaattctcacatcaattgatgtgagattttctctcttttctagttcttcttttctttctctttgactgttctttctctttatttggtgcttttctttccatgtcagttaaatttgtgttctccatggttctctctttgttctctctttctgctttcctctaacgcttgaaaacactgaaaaaatacatattatacaaatgtaccctgtttccctctttctctctgtacagacacacatagtgattattaaaatgcaaactcacttcaacatactgctgatttacagtcgcatttcctccctatgaatttccttagttatcggatcaaatattagcaataaaactactgttatctgtgattatgatcaatttcaaattttgaaatttatcttcgtgatcaaaatagtggtaaccattcatttgggacataaagttatttaatacctgatttctacctacatttcttgttaaattttgccaaactccttatgctcttcagtgccctgtctccacaccttgtctctcttcaaccagaaatgcttttgtttttacaactcctatatccttgcgtatccagtatgcatatacagtatttaggactctcatttagaagtaacaaaattgaagtaactaaagcaaaacaaatgagagagaaaggtttttcatatggaaacaggaatgtgtcatagaatccaagggcagtaataaagttttgactcaagaagggactaatgcctgtgttttggttatttatgatagccatttattattcccactaatggttttgcgtgttgagaaagctcacctggatggttctcttttgtggtttcttatgtgattttagtccattgttgtctgatactatagtaacctgaatgctcaactgggctgaacgtccaagatcactcattcacatgcctagcagttgttggctgaaagccttgttgtgattgttgctgaagcacttatccatggcctttcgatgttacttagctttctcagagcataatatgttggatggattctaaaagggagcaccctaagaatgactgttctaaaaagatagacgtggaagctgccaggccacttaaggacttttgccataactggcacttggactatattctattggtcaaagcagtcaaagagtcaacccagatttaaagagctgaagaaataaacttcacctcttgttgagggagtggtaagaggagcatgtgctgtgggagctattattgcagccctctttcgaaaatgctatctacgggctgggcacggtggctcacacctgtaatcccagcactttgggaagccgaggcaggtggatcacctgaggtcaggcattcgagaccatcctgaccaacatggtaaaaccctgtcgctactaaaaaatataaaaattagctgagcatggtggtgggcacctgtaatcgcagctacttggttggctgaggcaggagaatcgcttgaacctgggaggcggaggttgcagtgagccaagatcgtgctattgcgttccagcctgggtgacagagcgagattccatctcaaaacataaataactaactaaataaataaataaagccataccgcattggaagccatcagtgtttttgttaccacctcactccctatgcatctacttctttcttctctctctgttcatggacctttgctcttcctcaatccactctgcaaactagggacttcgtaagcacaatttgctagtatatgtgacacaattcgaagcactcacagtttgaccagactcttctgtcaattctaattttctgagagagattctgatgattctctcttaacacaagcattgtgtgtattctgatcacccataacatggagttggccagaattacgtggcacagacatggttgttactggcccacctttttgaggaggattaacatttccaagatgaaaggccctagccataacccctctaaagcatctgttactcccagcaatgcttactaattattgaaagttctactttaacatcaactcccttatgacatcctccgtacaagcatcactccaccctgcatacttccatccaattttatagattctgtgatgtttcttgctctataaataacgtcatgcacctagatggatccctactcccagattctaggttcacgaaacatatcaatatttctcacacaaggtagttattcaaccaatgaagatcatcgatatggtaataaaataagatacatttatatgcgtatttgctctcatttgttttaaggcagaattctaactatttaggtaattcataattgatttgcctctataattgttaggattaatattctaaggaataatattgaggtacatctgtgaatttataaccttgcataaggagctccttaaccacttagtccatgttcttggtataattctcattactcagttcagggctatagttcgctctggaaactgctaagcaaaactgatgttatcttctaatgatatgtatcagaatttactccaattggtgtaaattcacttacactaatatacgttatgcaaaatgatctgcatgataatgttatgggcactctggtataatttagtttctgctctaaattataataatctaataatgactgaattttaaattagaatgatttgaccgctagctgattttgtatggatttgacagaaataaataaataaatgtattgtgttcgtgtccacatgctgcagagatccctgcctataactggctcagaaattcatatgttaaatgcagaatatactttactatagaacttgatcgaaaatgtctttattgaatatataaatattgaaatgttttatagttatctaaaattcacaatcagtatctgccggaagccatcaaatatctatcagacaaatagcaatacctgtttggggcatttgacttccatttcttagattcatagcttccctgaaatttaactgaaatatggcacataatgactgagtagactacactaaggccaggcacagtggctcacgcctataatcacagctctgtgggaggctgagacaggagaattgcttaagaccaggagtttgggaccaggctgggtcacatagcaagactctgcctctacaaaataaaataaaataaaataaaaagaaggtaattaaggagtattttccacatgcaattttctcattatatctcatccctgtcacagttggctgaatcttacagattaacatcatgtctttggtccgatttgagtgtgacttcaaagataaaacatatcaattctacatataatatataaattacctattgaaaatgatatctgaaatagttgatattgactcaaaatgattattgcttttttcataataatcccatagggaagaaataaatcgtttcacttggataatttatgaaagtaaaaaatatttatgataattctatttaggtgatccacctgcctcgacctcccaaagtgctaggattacaggtgtgaaccaccactcttggccaatttacggtcattttaaaggaagctacatggtagaggtggttgaggagagtttctgaatttcgtcttcttggaaagttagttgttctttgtagagcatgctgactaataatgctatcctcccaacagaaaatccaatctgatttgacaagtcatgagatcagtttagaagaaatgaagaaacataatcaggggaaggaggctgcccaaagagtcctgtctcagattgatgttgcacaggtatatgttatttcagaaactaaggaacgtgttttcgttgggcattatactccagtctatattggacaacttgattattggcaagattggatttgaggacattatttgaaaactataatttgatgtctaaacaatgagtgttttgctctctacattttaaagataaaataggttaataaattaccttttatttagtataacattaagaaaaaactactgaatcattctcccaaatgtatgttttcctgtgttggatgaatggaaaaatactgctttattttgtttttatttttctgtatatcttcagaaataaaggcagatctatcaataaaaataggaccagttattgtttgaaaggcaaaattaaatcagtgcctttttacactgtccttacagaaaaaattacaagatgtctccatgaagtttcgattattccagaaaccagccaattttgagcagcgtctacaagaaagtaagatgattttagatgaagtgaagatgcacttgcctgcattggaaacaaagagtgtggaacaggaagtagtacagtcacagctaaatcattgtgtggtatgtatttctggtggcaaatacgcaggtaccccttgactttcctcattaagaagtaactgctcttttataagagagaattgttttcagataaccataataattatactatgtaattttaagattgagaacaaaaattggcacatgtattgtggcctattctgtgtgtcttttttgagtctataattctgctaagaactgtgcagaatataaaaggatgttgcttgtgtttaatttttatgattctttaaatatattttaaatggaaatctagaaaggaaatatattaatctaaaaatagtaacaacaacagtagttgcaataatcctaacaacttcagaaataatggatgccaggtaaactacgtgacatacagaagtcacctttaattcttaaggctacagattacctgagagaatttaaggacaaacagctggtgaatggcaaagcaagattccaattcaggtactcttattccaaactttaataactttcctttaaacaccagtactggatatacagtgaaatgcctcaagacaacaccgaattaaaaggcatggaaaggtacaaatagcctaaagtataaatctgatttaaactttataatattgaacggtgtcctatgttgctgttattggaaactcaccaactgagatgattcctctgaaaacaaagctgaggtatgattgcatctactcgagtaacataagtattattataactctacatgtactatcggccattagagtgggaagtcacataaaatgaaaacacagaatgttattaaagggaaaacaagtctatttagtacttgatattttaagtattgtttctacatctactccataatatcaatgaaaaacagagtccttcagatacatcgtagtcatatcatgaatggggaaatatttttctttttaacaaatatcttaaaataaatacatatatttatgtgtgaaaaatatgaggtattcttattcgataatatattttcataattcaagctgcattttagtggtataattactttaattattctcacccccaaaaagaaacttggaatagaaatgatagaaagtagttagttgatattagatgagtaaggataggaatatatgggaacatatcccatcttaaattttgccaaaaaaaaaaaaaaggaaagcataaatgacccaagtgccttattcatgactaatatttgcaaagtgagcacttttcgttcttttctagaaacaggtctctaatgttaccttataaaatgtatccaacagtaaatatgagctgaaaacaatctcacctgtgtcaagctgtgactgtgccctgcgtcagtacaaaggaaactgctcaaggcatttgctcaattggtttctggttctggtttaaatgtcaggaccaattgaagcagttctttcataagaatatccttacactgtttagttttttcattgtttacgatgctttgtggtgtataccataatcatagtcttgccttcaagacatgtttgtctatttataaaagtcttactttcatgaacacaaatataaataatatttctcccctttgtttataaatattttacttgcctattgaatgaaacaatgttaatggctaacggtaccttgagggaactttcttcatcaaaataaagcatttatattttttgaagttcagagagtaaataatttagaaaaatctctgattccaaattagcatcgttgatttccaacataataattaatttcagtgtttccagatacacagatatttttatatcttctaagaaaaaagtaaaatgaagtaaataatatcatctgggaaactcagacaaaagtcataattattagtgatgaaggaatgttaacatcatttgtcaaagaggattaatatggaaatatacatgtagcattgatcagataattgtccagcctttacaaaatgcttttttttagacattacttttaaactgaaaagagaaattaaacccaatttttgttctaattccataaaaacaattacctactgtcaggtttattttttggtaatactaaaataagtactgatagttcagatttatgactaaacaaattaaagcagagatacataatgtaaactattatatatacgtgtatacgtatatacacacacgtacatatatttgaatacatggccacatacatacaaagacatatatttctaggaaaactacaaagcaaaattaagacatcaagtggtgttggagtggtgttggtggtataattgtgaacatagctgtcttccaaagttatgacacttgtcttatgatgcttttttatagcaacctatgttttgtgaaaccgtatgtgtgtgctttatatttgtgatgtacatgtgaattgtcaataatatttttatatctggttttcatcagcacttttaagaaaataaagttgtgtaatttaattaacattgaaaaggaccttactttcttatatatgatacaatatatattgaaattatgatgtagaaatttaggtgctttaatgttactaatatgtaagtaccatgagaacaatagtgaatgtgtgtgttttggccaccactgacttcccagtgattcaaatactatctgattgatagtaaccactcaataaatacccgatgtaggagtgaattaattcatccaaatttatggctagaattatataactccaacatttaaaatagaagtcatgtaaaattcagaattgacatttatgttctttgattgaagaactaaatatatatatatcacaaaacacatatatatgattaactctctgtttaataagaatagctgcaaatgacacatatatgcatgtgtgtagacaattagaaatattaaatcaacagaaaatgcaaaagctagatattgaccaccgctgcaaaatgctactctattaaaatttcaaacatggaatagcaattaaggggatctctatttatttctgttcataatattatgaaataatttaactctactgattatcatgttttgttttatgtttaaacttagaacttgtataaaagtctgagtgaagtgaagtctgaagtggaaatggtgataaagactggacgtcagattgtacagaaaaagcagacggaaaatcccaaagaacttgatgaaagagtaacagctttgaaattgcattataatgagctgggagcaaaggtgtgtgcatgctgagaccacaaacacttctttccactttccttataaattgtaaagcaacgggcaataaattatgtatgattagagtcttagcaattctaaacacctctctctctctatgtatatgtatacgtatatatatacacacatatacgtatatatatatatgtacacatatacacaaagataaacatatacacatatttcgatgtggaattctcattaagaaacaataattaatcagtgaggctctgcttattcagattgaaaaatacgtaacgctcagggaggtttttcctggtccatcagatagctctaaaagggtttcttagttgtaagtgttccttattttcattatatatatctacttgtgatgacttgaagactggtaaatattataaactgtatctatttatatgtaggtctaatgttgttaacatattccacagagaccacattaagtttaaaaattacacagtaattatttccctatatggccaagacttgcaaaatctaccacacttggctaataagatagcatggatagccagttaagacctacgtctctgtaattatttttgtatcattgtcctgatcagagtctcatgaccagctccacttcactgctaattcaagatgcctatatctctccatctcacttcgctcaactcaaatattctgtatagattatgatagtaagtagtctcttcactctgttgattgtttgttttgctgagcagaagctttttaggttgatgcgataacagtcgtctagttttcctcttgttgcctgtgctttgggagtcagatccaaaaaaaatgtttgcccagaacaatgtcaggaagctttttcctgttttcttcaaatcattttataggttcaggttttaagtcttgagtccattttgaactggttttttatatgctgtgagataagtgtccaattgcattttcatgcatttggatatccaatttctcagaaccatttattgaagagaatgtccttttttcattgtgtattctcggccccttggttgatcagttgatcataaatatgtggatttattattgggctctctattctgttcctttggtctatatgtctgtttttatactaccatcctgctcttttaattactagagcattatagaatatttttgaatcaggtaattatgatacctccagcttcgttcttttggcttaagattgctttggctattctgggtcttttgttgttcaaaatgaaatttgggattctttcttctacatctgccaaaaatgtcactggaattttaatagggattgcattaagtctgtaaattgctttgagtggtacagacatcttaacaatattatttattccaatccatgaatatgggatatctttccataaacggatatcttagtatttccaaaaatggacttctaacattttaatttcgttctgactgaaagaactgaatttcttggaggataaaaagttatatttttacaactcaggttctcaactttagtgaatagaacaacatcactgataaaattgtcacctcatcttagacagaaatatgaatgtccatgtttgagaaatagctaaggagaggcatatttcttgcatctcagcctgaaagtagattgaaggttatatcttcaagatattagttgccaattccttaccatagaaagtaaattttataattaagttgaaatctggaagtaatcatttttcttagatagtcttgtttttatattttaaaaaccctctaattaatatttgttatgttttaaacaagtttgttgccatcctatgacaaaagattctcctactttgtttcaaaataagaaacactgatactcaattgatgggaaagcattatgataatcttgaaataaaatacatttcaactgttcatttggtctaccaaggtacctttggaatgagatacctttatatcctctagagaaatttatcattgtttaaagatcaccacagacagaaaaattgtatctgcacttgataccttattccggtgcttatcaatttttatagatgccaattatttcatatttaacatcaattacgaaggactgagtaatctctagtctcaaatgtattagagattgaataatctctaatattaatcctaatgctacagcttcagttctggagatatattgtttttgtaattataaattttaaattaataaaatgaatgtatgttatagttataaattacaaattttcagtttataatttgacctgtgtgactttatactaaaataatgtatggatgagtattttttaaattaagaaaatatatgttttggtaaaggggagtttctcagtttactttttaaaatagaggttttttgtgtgtgggctttttatttgtcataggaatttttacgaaatcattgcaagagtaaatttaacataaaataacagaataaatcaattagaatttaaagcaatgaaagtgacattagacgaataatagtgccctgagttgattattattcagaaatgaatgattctcgtaatgatgtcaaaccctatttattcctgaaaatacatatctgagagcttgtgtttattctaaccatttgccacatagtaatatccttaaagcaaaataaaagtgtatgaagaaatcatatttaactttaatagtatcacagaatacagcaaaaacataggccaaacatttatttttgaagtaaatattgatgtagaaacatttgtgactaagggatcatgtataaataccatcttataaaaatgctgtaagtcctatattctttgcctgagaataaaaatattgtctggattttgactcaaaatattttcaacagcagtagctttgtctaatgaaagcaaaggcaacaaaggaaatgttattacattattctttttatgtaagaaggaacccttctattttaaccatcttcagaatttatatggttgtgtctgccacaattgagtatgcattacctttttggagtaatcagctctggctgccataacacaataaaataaactaggtaaattgatttctgcaagtgtggagtctgggagtgcaagatcaaggtgctgatccatttcattcctgaggagagctttcttcttgtcttacctttttgctgtattcttacatggtgatgagtggggagagaaaatataattaatttattaagagatattaaagctggcaccattgatgtaataatacctataacccctttttatttctctatgctctgatttttatggaaatttacataaatagcaatactaatatcatcccttaaatacattgttaacttcgtgaaacaatgactactaaaacattttactgcaggtggcattgtgttaaacgtatccattcctcgcatacacacacaaagtataaaactcaattttccttaagatggcagtgtctcctgttttttaaaaatgtatttagctggaaataaacaaaatgaaataaataaaaatcaatactgcattagctctgggaagatagaatttctttgaaatattgaatctggaatcatttttctaccaataatgcataggaaaaatatgcatagaaacacaccataaagtatattttccctcaccccccacacacccctacaacacaaaattcttgcagtcaaaagggcagatgcttttacttaggaaaaaaaaaaatagaagggaaaatctgtttaaaaaatgaatttacagcctcagcaactaaatgttttctaaatgtacgcacacctctcctaaagaaaataaggaattttattatttggaattggaattgttatcaaggttccagaatatttatttcgattgtagcattttagatgctttatacatatttttatcttttgtgtttttcttgcttatagatagattcttattttggttgtacacacacatacacatagacacacacacacatatatatgacataaatatatgtatcagtcagtggtgcctattgggcttagggcataatgcacaaataacgcacttgtggtggtggtattgttttaaccaattccattacaattgaaattaatctggagtctacctttcagatttcttagcaacaaaagccaaatcttgtccatgttttatttacctgtaaggtagtaaaataaatgtaaataaagcttttgctctatacattcaggcacagttttttattgaaccatccctaaaggtaaataatgagaataaaggaagggattgaggtggtacaatatgtcatgctctctcaaactgttgtctgcctttaccctcgcaatattcctgtgttctattaataagtatagtaatcccatttgacagatgtgttgagaaaaatgaggtgttctgccaaaaatcatactcaagtcgagagtccactacgtatcgcagagcctaacatacttacattccatcatgctgtttctgcagagccaaatatttatatctattgttcagattcccaggcttcatgacagacaagggttttttttaaaaaaaggtgaaaacacataccaaagaaaagaaaaccaggagcaacttgtaagagtataaactctttatgtaaattctaccagttatattttctaacttgtaattaacgatttgcaagtcttcattcattcctttattcaatacataaagcatatttagtgagacctttctttgttcaaggaactttcaggagtagagaggagtaatctaaagatgtgtgaggcaagaagatttgcctttaagaaattgtaatttatctggcttttgttgatgatttgactgcctttagtagaaagagatgctgggatttttattaaaccaaccaactgaaaatcttaacaaaatataggcacatctgagaaggtggtggagaaatacagatttgttcatttcttatgtgagaatatggataatttgcttttgagggtgttggtatcaaacactgagaacaggagcacaggatcaagtaattagtttttctattaatgggaatgaatattgtcttcacattcatctttttgtccctattggatggcaaaattatgtttaaggaggaagtgacctattcactgtattgtttttgagcagatgtgagacactttaaagatgtaacgaggatacagttgagaattctaggtattacacaaatacttttaccttttgagagaattaatcttctatcttcattttgattccttaccagcatgagctagtctcacttgtatatagaggattgtaaaccttcttgccatattattgacacatgacagtaagttttcagtgagaaatgagttttatcttcagtttgacttatatcattgtatttatcataaactttggctataaattatcttagagaaaaattcgtataggtttcttttctaccatgacgacatacaagaccctatcttttggacaaacgatgtcatctgccctagacagtttttattcactcttaatattcagaatatatgatttttataaaatattattttaaaacgtgtaagaaaatagttattttaaataacagaaatataaaagttccaaataagtggttataacgaaatttgaattaaagagtaaactaaattacatttcattataattcttttcaggtaacagaaagaaagcaacagttggagaaatgcttgaaattgtcccgtaagatgcgaaaggaaatgaatgtcttgacagaatggctggcagctacagatatggaattgacaaagagatcagcagttgaaggaatgcctagtaatttggattctgaagttgcctggggaaaggtaaaacctatatcactgaaggttattttgaacatacgtgaaaacacataatatgattttgtaaggaagtattaacatgtagcaataatagcattataaatattaatattgtttcatattccctttcttaaaaattaatctgtgcttttcaggaccatgataaaaccaatggtaagctttagcaggagtctctccaaaagcttccttagagttcagtaaattatgaataagaccttaagaaatacataggtcattagtctgaaaattggtccagagatgagatcctataatgtactggcttgcctaagaccatactgcccagatgaatcccacagccatgaagagggcaaggacacagagattgaagacagttgggctggacaggacttgcaagattagcatattgccaaagtcgcatttcagaaagaatctcaaggtgtctatgcaggggctatcatttccatcaccaaatgacacagcgactcctgtaatcattagccgttaaattcttgccctttctctgatggccaatcatttcatgctgcttagaacttagtcaagagactcatagcttagtatttttttttttactgtttattcattaccagattacctgaaagtgtgttgatataaagaaaatagctgatattgataacatgttttacctcaaaatttgccactgtgttaggccatttacacccacttaatgttttaaagttaccaaattaactagatgtataagacgtttatactttatttttaattcaatgtggctatccagattattcaaagttgggaaattttcaataccttatgtaaaaacttacaatcgtataaatgagacccaaactgaaaactgtctttatgtagattcagagaacaagtagtaatatattttgttacataaaatatttccaaataaatagtagggaattaaattgtttttcttctctttcagaataaatgtaatgttagataagatattgaattatagttattcaggatcatacatgagattactatagcaaggaagatacagtatatacaggttaaaactcacattagccttattttttcttatcattcaaacatattacttgaggtatttttgcattagcctcaccatgaaatcattcaaatgttataaggtaatgacctttgcagaggtttctaggttatccttctcatatagaaggcttgaatagtctggagaattgtctgcttgttgaatctgcctggaaagtatttttcataacgtcaaggagcaaagctactgtgagatctagtaggaaaaaaaaaaagcttagaaaactggcatttattttctttctttatagaataaagataatttatcactctatctagatcttttcaaacactaagctgttaatgacatactctaaaatctcttagttgtcaaataaagtatattcatttgcatctgaattacagaacttttttttttttttaccaatttatttggaaggttctcattatttctttaaaaataacaatcataaaagaatatatgccctgcagatctaagccagtcacatttatgataatcattctaatattttaacataaaattcaaactctcatatatgaaaccccgtgactattgagtacattctcatttctcatggtttcttggtaggtggagagcttaattcaagctataagtttcatctgctgtttcaaaagataaatgtcacatttttaaaaactaaattaaattcatttaaatgcaatacattaaatgtagttgccgatcattccaagtatttggaatgtgactgcagcaaatttgaatatctagagtcaatttcttttttattattttaaaaaatttttagacaatttaatttatatctgctgaatttctcccagttctgttgacccaagaacattatatttattttcgtatgaaagtatttgaacatctagtttcaaatattcaaatacataaaaatgtcaattactcatgaagtgattttttgacctttagtttatccaaacaaagcataatttcaagtacattgactatagttaaatagtatcagttttatcttaaagtatcttaattatatttaatatatattaaattccagaaaaattatttagtgtggcttgaagagatacatatggcacaacttgagaagcctaaataaattggaaaactaggaaaaggaaaattatagtagataaataataaaaaattcttgcatagaaatatatccacaatgtatcatgggtggtggaatggacagggaacattttaaagccacaaattggcgccaagcttcctaaaagacaaaaccaagaagtaaacatatttttgagacccaaagtttccaaattattaaaataataattaaaataattttaactttactagtagtatgttagctttttgctagaacttagtgccagaagaaaataaatgggagggtcataaaggtgataacacgctgattcatattcttataataaacaataagaatgtttatttttttctaccaacatggctccatgaaaaagaaaaatttagtgctaaagggccattcaggaaaagcaattctatgagaggaaaaaatattggagcagaagtctaaagtagtctagcaattgttttcagattttcagattctctattttattaatttttaattttgtatggatacatactgggtgtatatatttatgaattataggagacatttttatacaggcatgcaatacgtaattgtcacatcatgtaaccttctgtgaatatgctttcctgcaactgagcttttaagtagaattagacatcagagatttgaaggttatttattttctctgaatacagaaaaaaattttctgtatctttttcctggaaagaagccagattgtttctaactgagaacacatttctatacttggccctatatctaattggaaagcagggcttcatattcatgtgtatgtcatagtactagaaggcttcaatagctaaaaatttttgctaacatagagttttgggtttgaaccagtcacagagaaattggctattgagccttttcgtgccaagcataattgaagaaagaaaactcaccatcgacaactcaaaatatgttgacttctctaggaacctgtatcaatctctcagtgaatgtatttatttgaaaacacagttgggctattactttagctgtaaaagctattgaaaataaagctcagtagtactctcttacttgatgatggcatttaaaaggtgaagtgagaatgttttatagggggcatgaagtatcaagtactgagtgtgatgaaaattaatatactggttaatgataatactgagtctaaatgtactagtttttcctgtgatatgagaaaactagaattcacttttcaagatcaaaattagcaaagaatttggaagtattgctccaattggagaatcagaagtcaccttaaaaacaatacagattttactaatctatagtaatatatatttcataaagtcttcatgtgacacaaaagttttagggttttggtttttaactagccgtgttatataatcgaggaaatttcctatcctaaattagaaaagtataagcatatttaaagttcaattcagtttttcttacattacgaagctgagaaaaatgaatctaacattaaaatcaaaagcaatctggtctggcttactgtattcatgtcaccaatgcggtttatcaaaaatccctgtcatatcaaatcaagcccttccacaatgatctaacacttaagtttttatgagaaaaaaaaaaaattggattctctatactcatttcacctccttaccgtggctgtgggcaggccccagatgatgcattgtctataatataaactatgttggtgaccaccaaagcagccaggcattcttgctgttccttcatttcttactagattatgttatttaattaatttaatagtatttcatcgcctatttatagggccatagtccatgtgcaagcagttttccagtaccaccaaaattctcaataaggtcccatcacaactatcatttaggcctaccataaaatacacagaattaataaaatgagacaaccatcattgtgtgagcaatacttaagtcagccccatgcaccttcagagaggtactactagcattgagatgaattattccaacttgtagggaaaccaaatagataccgaaagaaagagtttattcttatttatttattttgagatggagtcttgctcttgtcaccgatcctggagtgcaatggcccgatctcggctcactgcaacctcctgggttcaagcagttctcctgccccagcctcccgggtagctgggattacagacacctgccaccataccctgctaattttttgtgttttcggtagagttggagtttcaccatgatggtcaggctggtctcgaactcctgacctcaggtcatccacctgcctcggcctcccaaagtgctgggattacaggtgtgagtcaccacacccggccagaagagtttcttacactggccaaaagatcagttatgttctttataaacttggcataggcttagggggcaattcaccatttgttttctaatgctgtgccctttaaaaaggaaggggaaggttgcctaaaacgatgaaagagatgttataaaaatcaagcttcttgagaaatatagtaaaattggaaacaccttaaatgttgcagtgtgttaccatttacacaaaggataaaatatgtagaaatatacattatttagttatatataatatatagtaaaagcagaaagatgtttgggaattaatataaactgaatacagaacaagagctatctctgtgaggaaagacaaaagaattgggtgggatatgaacaggacacttaaatgatacttgtaatatttcattccttaagatgagttatgcatacagaagtaatgattacatttggtatactttctgtgtgtctaaaatcacatataagaacataagaaaacatacaaaagcaaatgcttgggatttttccttttggaaactccactagccaggttctgtaagataacgcttagtaattaaggaacacccacttcgtgagtattattggtttcaaaagagcatggccactgttcattcggtttgcctaagcattggccaaagattctcctgctgattgagcaacaggacaggaacctagcagattaattccagcgagatgaataaggaacattgtctttccagtttttaaagaggatgtttctgtggctttttttttctttattatctacattgaagcatgatcgacagattcttatcaatgatttccttgtgaaagcagagtcaagggaatgaatagcgcaaaccgagaactgagaattttcatcaaagtggaaccaaaagttagcctgtgtatggtcagtttgtgtggcagcagtgctgttctatccttaagaacacttctattcagagagaatcgttattagagaggacagatctgtaagtcactgggtgaggtaacatcagaactgaaggtcctctgaaaatgatcttatttccctttttgtaaacaagaaaactgtgcaaaaagctccatatccctttctctgtttctcgattactttctttttaaaattactttagattcaggggttacatgtgcaagtttgttacatgggtgtattgtgtaacaattctaaaattcatatggaaccaagaaagggcctgaacagctaaagcaatcctaagccaaaagaacaaagttgagggcattacattgccccacttaaaatatactacaaagctgtagtaacgcaaacagcataatactattacagatatagacacctagatcaatggaacagaatagagaactcagaaataaagctgcacacctacaaccaactgatttttgacaaagttggcaaaaataagcaacagagaagggacaccttattcattaaatattgctaggatagctggctagccatatatagaggaatgaacctggacccctacctttcaccatatacaaaaattaactcaagatggattaaagtcttaaatgtaagccctgaaactactaaaaatcctagaataaaacctaggaaaagttcttctggacactggcttaggcaaagaatttatgaccaagacctcaatgacaaatgcaacaaaaacaaaaattgacaaatgagagttaattaaattaaagcttctgtacagaaaaagaaacaatcaacacagtaaacagataacctcctgaatgggagaaaatatttgcaaactttgcatctgacaaaagaataatatccagaatctataaggaacttaaacttgtcaacaagaaattaaaaaaaaacagattaaaaacaggacaaagaacgtgaatagacactcctcgaaagaagacatacaagcggccaatgagcatattaaaaaatcttcaatatcactaatcatcagagagatgccaattaaaccctaaataagataccatctcacaccagtctgaatggcttttgttaaaaagtcagaaaataacggatgttgattgctttcatagggtgaccatgattacatttgtaatagtcattcactcctaaggatttcaaagtcatgtgggtccaggatcctcaatatgaggattaatgttaccatgggaaccatgaaaagagctgacctaataggggccatatcaattctagccaacttcttgagcttcctaatagagaagaatgcctaagagactctctcaccaagaggaaggcaaattaactagtcagataaatgagagcagagatgggcaaactataattggtaggcctaatccattcagccaccttcttttgtacagcccatgggctgaaaattgtttttatgtaaatggttggaaaaaatcaaaagaagaactagatacttcaggacacataaaaattattaaaaatgcatatgtcagtgtctgtacataagactattgaagtgtatcaatttatatttgtttattttttctggctgcttttgtgctaaaacagcagagttgagtaattgtgacagagactgcatggctcacaaagcctagaacaactactatgtggccattcacagaacatattcaaactcctgaactagaggaaagctaatatagaagcagcaccctgtttgaccatagaattttgccatgtcttcttcttgaatgagtatcagaggtttgacatttctgggatccttttgataggccagtggcgttgtagaattggtctttcctaaatagaatgattcatctaagttttcttcctgctcagaattaaatagtaacatattccaaaccatagatactagaatgcatagcccttccaaaagatactgggtggtgcgtgacacaatttaagatgtttaaagataccatctacttgaagagaattacgaactcaagaatgtcttaggtattctaattcttaatgatcccacagagaaagaatgggagaacttccagaagtagtgaggatgtggtcaggggtgattaactgaagggacagctgcaggtaagaaaactgtcctgtgtccccttaccctgtgaccatgtttccaaattatagttacagaaaaaaagaatatattttaaaagtattccaaattgtttaaaaggtaaagaaaaatttttaaattaaaatgacaggaggaaagccatttgagaatattaacaaatgagataaaagattgatgatgaaaattgacaatttaaattattaatgctaattgcaacttcctacagcgacatagccctttcactgtatttttaaattcacccttcaatcagagtagtattaaagagggtaaaattaatgttaagtttttaaaaatatggatcaatcctagctagctgcatggtccagacaacagcaatgccacgaggcagccatcacagtgatatttatcaccccataaatgttcagatacttttccttttctgttaatggaattttctaggctgaggtgacaaacactgatagctgtagaatagagatgatggaaggaaatggcaaggcaatctacaggagattactagcacctgaagagtttgaatactggaactgcacaagttccttgagctttcatgataacccctactctcttggactgttatgtaggcaatagtaattcattcagcaaaaggacagggaaaatgtgtattttggtctctgatatttcccatgtacataagatattgcctgacacataggacatactcatgaaatatctgtttaaacgtaacttgcaaattaagagttgcaaattataatgacaaagcagttcttgagagaagagaaaaatgctgatttacatttaaaattgtacaagttttataacaaacataaataatcacctgatcaaatgttcccgttttatagatgaacaaatacaagtcctggtacatagcaaaactgtaatactatgcctgatttcaacagttttttccactataccaaattatcataagaagtcttattttctagtaattttaaagtaatctaagcttaaaataacaaaaagctacttattcacaataagcatgaaacaaaccatggctaaatttcaagtgcagaaaatataagtcctcattaaaataataaaatgaaaacccgtgtgtatctatcacctactacagtctgtagtctgtccccactgttgtgattttagatttcaaatattgtttgttagtatcttaatatcactctgattagttgagtgtaagtaaatcaatctgaacatcccattactggccaatattgtttagcatatgaattgatcacgaaaacataaccataggaaagtaaatatgtatgtgattaattagaggtttacttccctgaagatcattatgtttgggaaatacaagctttgacaaagtctaatctatatgattttctgatttaatcactaacattttatttctaattttgttttaagcatcaaagattccaactcagttaaataatttagttccattaaacccctaaatatccatggtgtcatctgaaagttcaaatggtagaataagattttctggaaaaaaaaaatttggtcctatagtatgttcatcctaccgcctgttttattaacagtagtcttagtatgccaagagttgcctgagaggaacacacacaaacacacacgcacacaaatggtattaataaatttaactgaaggtgttaaatgcagaataatctatgtctaaatagccacttgtttaacaaattaccgtgtttttcacgtttattttggaaacaaagttttataatatttaacctcaggaagaacaaacattggttgctcaattatcctttggctttcagttcactcttagaatttaatgactatcactcaataaaaactcagaatgcatctttctgtttgcctgtggttttcaacattggttgcacatcaaaatcacccgagaaacttgaaaagtatcccaatgtttggggcccacttccagagattctgatttaattggtctaactctaactagctctcttattcagcaaagttgagaatcactagataatgtgatacaagatccgcgaatttcaagctgtctgacgagagcctaaattcagctcagtcaaccatgtcttgtatatatattttttataacagtaagatttcacagtttaaagagatctggtttctggtcctagattatctggataactgcctcaactcatcattcctcttagctataaaaatataagaactattacttactctaaagtctgttatactctcattcccctgaaaaattacgtatcttttttttttaaagtgagcagagtaatttatctgtgaagtgaaataacactagcagatcattaacttggtgcaatgaatgcatcaagcagctgttacttagaaaatagaacatctgttacatgccattggagtcactattcactgtcattatagttagagctgttatttctgttcagttcattctgctttcatgaaattcttctttaataaacaatacagtgttattaaaaagtcaatacacattgctatagaatccactatttaatgctttatgttctttttgaatgtatcattatattattctgtcacattagcctaatagtaaaatatgtcctaaacctctagccatgatagagtaattttgggggctgtaaaagcaattagcatctcatttcctcatgtttaagacatgttagattgtgtgatgcaccattgatatgattacagctgctgagaatttaaaaaaaaaaaaaaaaacactaccactttcaaggtaaaccttaattgtatgttacatctcaatttccgaatccttaaaatgtgacaaatgcacatcttagaattgcagtaatatggcaatgtattccttttctttccacgaatatgttacgtagctaaaaggtgaaagaaccctctcctgttctctgtgatcagaaatggtataatatttgcaaatactaagtgcagaattcacctgggtagggggacttctcaagatgccttttatggatgctttagttagccttttattcatattacagggaacatgagtaagagaaaggaatagctaaaataagtctgaatttaattgagtcctagtaaagggaggaatctataaggaaatgatgttaaggtacgtaggtaaataaatgtggtgctgattgaagataagctctagagaacaggagactcttaagataataaaatttgtttaaaaagagggggtggaaaaaagagatcagacagagaagttatcttaagaatataagtccctgagaaattccaagaaaatctgtggaaggtactggaaaacttgtgaaaatacgaaatgggtggaggagagaatagaggttaagtgagctacatttctttacccctgaagggaaatgtttgtaaaggtgttcctataggaccagatgatttttccaataatttttaccgttctaccattaaataaaaataatgaaaaatgctgatggtataatcagcagagaccaatggagaaggtttttccatcttgctactgtatcagtgaagtgagccgatagctgaaccctgaaccgaacatgcctttttaaatttctacaagcaattatacttgtagatatggggaatgaatcagaatgtattcttcatccttcccatcaacatggggcatgacttcactggaagaaattaactcattatactcattcttttataataaggaaattagagtagcatttacaaattatggctaagaagtagacagcaaatttgtttgaaatcatggaagttagtgcttagtatttggactatttatactggagctatcaaatgttacaaagtaacatatggaaaataatatgttagacattgtgagaatttatagtttaattggattttacttatgtcagatattttcccctctatcataaaaacccttagtgccaagtatatagtttgcgttcaccttctcttgaatctcctgaaggtggacttacaatcatgtcataggtcaagttaaaactgagtgtacacaatcttgctttttcttcagccctaaaatcgatcctagcagcaatcacattactacatgactgaaaaacctaaagtgtctgagttataatttagtgaatttagtcattgaatttgaacttgctccttcagaagagtagatcttctagaaccctctccacttctcacctcacaaggcagaagaaggcatgtatgctgagaatcggatgcttttgaaaaggaggaaatgccatatcttttcagctgtttctttccatctcgccaaccctataaataaggagctccctttgagaggaatgagtacaggtataaagacaatggccaaggcaatagctctaggttggttctccatacatctgaagatgcagacattcttgtgttgtgggaaactattagagccagagaaaatggttcgtcaacaacctcatcaaatgtattcttttagtttacagtaagaattccctgttcctctatggcagccttgtattctaactttcataccttctcgttgcttcgtactttgtctttagtcaatccaaaccatcccatgcacactccgccttcaagtgtcacctttcccttgtagtcattcatgcttattccagccatggctcatctgtttccaaaaaaaaatgtgatttttttctagtatgatatcaaattgttttattgcatttaagctttcctctgcagctacactgtaggcatgattagagtgaggtttgcaaagattacctcattcctcatctctggcagtgaatagcacagtacagactggatattaggcacctgatatacattggtcaattagtatttcagatctccagaaagcaagctcagcatagtatttaaaggctaagtcttatttaagtcttatttcttaagtcatatctttgattaaaaacacatttgagggaaaaatttaaggcctactaaattaacacaatattttttcctaacccaaaacagcatgtatacaaatgattgaatactggttccttattgttgaatagcatacataaaagtttaactctaggtctctttttttacagagtgtaaattgtcctgtgaatcacttttgaccattagcagttataaaccaccatcatatcactgcttttttcaaatacaagttgataatggtgataaattgaacatcttttagttttaatttataattttgtggaacttaagaaggcactagaaattagtccacatttcctattttgttcccatcaactgaacatcactggacattgtttaaattagctggaggaatttggccagatgttgacacataatggtttctgtgacccaggaactacctgcaacattatcccctaagttcaaaacttttgtgatctcttctgagttttggaaaattccattgcctttaattgcattgcttgtcatgtaagaaacaaaatctatgtacacaataactttttacattgatgctaaaatatagtgtcatctttatgaagacttattaagagataattagtaatccaaatataaattaagcttcaactttgtgaagggttacctttgtgaataaatcaactacagcgagatgccagtagactggaatatagaaagtagataattctcatttgcgtatatgtccatctctttgacaaactcatacttggatataagtttttgaaggatggggacttctctaccgttttatcccacagagcctagtaacaatggctaacatctatggttgtagaggttgtatactacaaaaggttgaagtcaaagtattaaaaggaataaaatctagtctatgtctactctgaagttaagctctaaagggtctgtatctacccaaatgagagacttctaataatctcccagaatatattgaggagaattacatatgattctgctacagtagtaactggcatataataggagctcaggcaacacttacgattgataaatgaagaaattgcttttatgaattgctaagctcacctgtgtgcaacaaatagcacctacatatgaagaaccccatgcatgatagctgtcgagttcatctggcattaagtaccttaatttcaggcatgtttttattgaaaaaatgtgacataaaaccatatcttagaattgaagaaacagtgtttttgtcttgcataaaaatttttatacattgtttcctcatttatttctcctgtttatccgatgccaaaggcaaaaccaaaacagaaagtatgagaagtgatttcgagtggaccaggaccttatggcgtggcagaaagacagccacaggactacttaggtatattataaagatagaaaagacatgttgagagtgactctatgaggccagcctatacctaatttcttactcttgtactgtaatttttttcttaagaaattagatgtaggctggcattacagagctgctccttgtgtgtttattaattgattatttgtatctggactttctccactttcctgttattgctgtttctcaatgattttgttttgctttggctttctgtgattaagacatcagctccactcgcaaatagcttttcaactcgagtgccaatcacagtctctgtatctgttaaccttattgagaaaggagaaaaagggtctgttgggctctggctcagctctctgtgaatgtcccacagctggctaactagacaggcagggaaagaaccaggcacagactcagtggaatgccgagtggccacattgtctgtcagccgtgccatgtaccaggaaaggggctttatgcagggcaggtagtaaacctttgtactaagatcactttttccatcactactctctatcttttttcatgttaaatgtgattgttttcatgttttataaatcacctcttaggaaatagtggtattctcttaggagattttagtctagggtatgtggatagaaataaggtctgtgaacttggattgggggaaaactttatctttatttgtattcaattaaaaccaaaagtaagcagttttttcagttaaaatgtgagcaacaaactccagcaatagagatacccatgactttgtcactaatagaaatgacagatacttttataacgtgttccagacattgtacatacttaaaaataccagttatgctcgtcatcactacattgaaattatcctaaagacctgatgctagatcttgttaattaacatattaggaaataaaacatgtattactacatcacaaatatttaaaaaatgtgttgcacattgtatttcagtataattgttttcatttaaaatcctatgtattttgttttatgcatttaaaagcattattatgagaatgggtttttaagcttcaacagatgccaaaaagatccatggcactaaaaggctaaaaaaatccctgctgcagaaatacagtagcaccatactgtagaattttctaagggcagtttcttatttgtggatggattttcaaatatctgcctttagccactacatgtataaattaaataaatataaatatatttagttgaacaatatgtatgtttattaaatatttataatgaaaaataagacatgaattatgcttatgtacatatatatgttcatagttacccaacaatgaagcttcagtatatatggtatggttttcatgattcattaatacatagttataggtttaaaaccttgcagaatcatagtaaccatacagaaagccgtttcataagcattaaatcttaagactacaagacattacttgaaggtcaatgctctccttttcacaggctactcaaaaagagattgagaaacagaaggtgcacctgaagagtatcacagaggtaggagaggccttgaaaacagttttgggcaagaaggagacgttggtggaagataaactcagtcttctgaatagtaactggatagctgtcacctcccgagcagaagagtggttaaatcttttgttggtaagagaaaaggctagaagcttttacacccttctctgtcacgagaaaaagatacataagtgaccagtaacaattctgtgtttgaaaatttctcaattctacgtatatgctggctcttaattcaatatctataacaatattttaatatatttttctttatatttacgcaatattctatatgaaaataccacttaaaactaatctcaatgaaactttattgttgtcttttaaacattttagaacataggaaaaattctttaagaatattgtctaaccaataatgccatggtatgtctctgtacaattaaggaataccagaaacacatggaaacttttgaccagaatgtggaccacatcacaaagtggatcattcaggctgacacacttttggatgaatcagagaaaaagaaaccccagcaaaaagaagacgtgcttaaggtagcaaataaaatatgaaaagtaatgtccaaattgtacaccagttacttcaatcatctttgtcctaaaagatactaaggacgtcttaataagagtaaaacaatcctttcttccttcctttatctttccctttttccttccttccccctttgaatggaaatgaatgattttgaagagttctgtaatctgactttctgttcaaatccatcactcagttaattatacccaatgtaaactccgttcagaaagatattccaagatttattttgaaatcatattgcaaatttctgcctttgtcaatggtggtactacattcttgtgtctaacacaaagaacaatctgacactatcattcatttagcccatctgaatgaacacctgaaatccagtcagctgatttttttgcctatgccatatccaaatcttggtaattagtcttaatgttgggcttatgtaaagctgaggttttcatttttaactacatgtaaactaggctttgggttctttcttttagtctcaaaactgactgttaggatgccctgtcttctttttcaaggggaacttaatcttttctttaaaaaatgattccgataaaagggtatgagaggtgtaatacgcaaatataccttatagacactacattgtttctatttgatgatgtctcttttcccaattaaataggtagagttgaattttaacagctctcttttcaataaacattttttattttgttttgctgcaatgtttgataaatttattgattagttgtttactatttaaagaaaactcaaaaattatgtttctttctatgcaatttatttttatgcctctgatattttccacagattacgatatacctttaatgaaaaactataaattcattccaggctatccccaaaacacatttatgccattgtctgaagcttattttgatgtggatctgtattgtgctcttcattatcccttgatgtatagtcagagatgtcatcttatggtgaatttccttcaaggctttttgaataatagggtctgagttatttaacttcaacctctgtgacccggcaggtcaggaagaacattcctcagtacctctgtatgtgacagaaaattcgtatgtgttagaaaatcactttttttcttatgacactcaatgtaataaagaggaacttgaaagtgctaggaaggaatagaaaagtgttcttcagctacctgacctcctgagcacatacttagttcattccacaactattaaattcagtaacgatataataaaataagactaaatagaatatattatgatagttgcaacaacatagttgggaaaacatccctgtccttcctcggactaaataaacattttaaatagacatgcatcaaacttaaggacggtgatctatttttctgaaatcacacgcattttcattttagtcctgttttatggaagttgtggttttatctccctttgtattttctgcatgtgcttgctctcattttcttactttctctctctctctttctcactcttctcgctcacttgctcactcgctctgtttggctctctttttctatcttgaccttcattaattactaacttcaagtcctatctcttgctcatggaatatagcgtttaaaggcagaactgaatgacatacgcccaaaggtggactctacacgtgaccaagcagcaaacttgatggcaaaccgcggtgaccactgcaggaaattagtagagccccaaatctcagagctcaaccatcgatttgcagccatttcacacagaattaagactggaaaggtaggaagatctactccaaggtggaaacttgtgctaaatggtctcttgcgaaggttgcgcagtactctgaaaggggcaagtagaccccacagcaaggttttcaaaaggaaaatgaatgccaaaatgtatttaaggaaattttaccactgattataatgggagataaacgccactcctccccgtctctgtctctctctgtctctctctgtctctttttctctctcatcttttgctgccatagatattctaggactgcattctatgctgcagtttacatacgtactttcaggggtcacctacagaaaaaaataacaaatagcatgctgaaggccaaaaaaataaataaaaccaaaagcacacaagtcatccatcaacataaagcactaccgataaattttgccaaaagcagtactgatacaatattgcttgtatgtaatgtggatcaaatatccaaaatgaggtcttgtacatcttctgcacggtctagggtgtttttttacctctttactggttgtgcaagtgtgtttgtttaacttgcttttgctagttgtagacactgtgacaaaattcattaggctataatgaaatgatcacgccatgaaaacaaatcattgcaaagcttacatatcctaatttttgtaattttatatgcctatttatattactgtttaagaagaaccagggaatatggaacttttgcgtgatagactttatatttgtgtatgatttgatgaagagaaagtcttatttaataagtagtttgcaaaaatgtataaatatagtgttatagaatttcagctctttgggaagatttgaaatgcaagtaattacctagaaatttatatactgtagtttgataaatttcaatatatatgatatgctttcaaacataaaaatgtatataaaatcaatatatgtatttaggtatatagataattgttagaaataatctgaaatgaaaaaaacattggagtatttatgagaaaatatgatgcagtatgtcaggtaagtattgattcctggaaaaatagaacattttcaaaaaatattttgatagatataagcaaccagtaatagcatggtttcacaattgctgcactttctaaggcattacagtgtctcatcatgttatataatagtacatatttaaagtagttttcaaaataagtgaaatgtgacatgataaattctaaatagtttagcttgtatgcatgagacacagttacccttcaaaattcaccttcccaaattaaaaagttgttagtttaccttaattcattgcaagttatttttaatagttaactacttagttctcttgtactctctctctccatacatagagaccttatatagttgacttttaaaaggctatattctctacatatggagagagacagcatgagagaacttagtagttaactgtcacaaatatatatatttgagtcagtcattattacctgcaaaaaaatgtgacaggctcttaaaattgattaaagttttgaaagaatgtattgttacttacaaagacaattgtttttacttctaaagatatcaatggcttatgtaataacaagacaatgaatggagatttatttcaatccttaaaaaatgctactacttcattactaagatatagacacacacacatgcacattttaataaatcactaagctatagaatatttaagagaaaataaggtattatctttggataaattgtgttacaagattgtggttcacagatattaaaaaatgggtagaatttgctctccaccacagatgtgacagacccagccaatacaagtttgtgaccaagacaagtttgtgagttttcatttcacattctgcatgaatttgtaagtatacttctggaaatcatgcataaagtgatccactctatgaacttcttttattttccctagaaacataaggcataagaaatttccagtgaatattcatttattattattattattattattattattttgtgtgtgtgtgtgtggtggagactctctctgttgcccaggctggagtgctgtggcataacctcagctcactgcaacctctgcctcctggaatcaagtgattctcctgcctcagcctcccaagtagctgggattacgggcgggcgccgtgacacctggctaatttttgtattttggcagagacggggtttcaccacgttggccaggctggtctggaactcctgacctcaagtgatcctcctgcctgggcctctcaaagtgctgggattacaagcgtgaaccactgtgcctggccccagattttcaattatatgttaattaacaaaataatcacatgtttgcttttcaaagtatttgtttttctctaaattagtaaaggcaactgagtgtaacaatgaccccattttagggctctgaagagataattatgctctattatcacgatgaaatgaaaaacacagaaataaagcatatctgacactttgcttatatattcattgcatcagctaatgggattgagcttccattgtgttagagattgtggtgagaagatacaagggtataaagatccttgcttaagaaatacatgttttcaaacagaaatgaatacttagtataatcataaaatatgtttaacactaattcatcttcatggggatgttcaaataatggtgagatgatctcggcagagagaacaatagatttagaaggtaatctcaccagagaaaacagtggatttagaagattgagatttaggcctaactttttcagtagtagccagaatatgtgatttttctgcatatccatttcattgtttgtaagatgaggaagttaaaatagactaacaatttttaaaagaaaacctatcctgcccaaaatattattatttaaaataaagtattaaatttaaatatttaatattaaaatcatattatttaaaattaaattaataaattggaaaataatagagttactagatgggggaaatatctgccattttatctttctccttcctatgattgaattcaggaagtataaattatgctcatagaacatggtttgaaatttctaaattagattagttcataaatccctgctcgttctaaaatttggctattcagtaatcttttgttgattacaataagaaattgaaaacatttaatgtcttgtgtgtgtttgctctggagtagggaagtgctgaagtgctggaggttttagggggtagcctttgatctcaaaatcaggtttctttatagtaggggttatacaggataatattaggttagaatatggcttttctatggttgagtctatgtctaagtttcatggaagagtaacctggggaaaaaaaatactatggtgataaaaaaagtagatttggattgaacacgggtaggtcatagactctttgtaatcagtaatttcagtatagcctttagaacataactctaaagagcccttgaatagagaaataacttatgctgaaaattcactggtgtctagatttactatttggtgaagaatacaaagtggggtactcccatgtctcctgccaggactgttcatgacaagaaattccgaagcccagaaagcagtgagtaaagggatcctcagttcagattggctgaggacttgactgtccaagtgcagctctctgtaatgttaattttggcctcagcaaggagcagtatggtgagagcaaaaagtccttaacttcaagacacaagacctgctttgagcactagctgagcacattactacttagtgattttggatatgcctctttacctctcagagcctcatttctagctacaaaataagggagatgatgcctgttttattttaatctaaagattgtaatgaggatcaaattatgtaatatatgtaaaaacatgcatttaaaatgtattaatcagtgtatagatatgaaatggttaaaaataattaatatcaatgggtatttccatcgttacgtatattacacttgaatggccgaatctggggggttgagacaaaaactgatggaaaaaaatgaaagaattgctgattttctgtggtctctgctgtaatcgactggagtcagaaaatcgtgtctttgctattttcatgacaaagaccagccttaaagataatgaagtggatgaatttaagaactactaaggagttatgtttgtcccacatacgccccttaaaatacataaaaatgctgccttttcccattttattaaggttacctaagagtatccaatgactttgaaaaaagcgtgttttttcgtaatctatgtgaaatcaatgtgaggaaatggcagttttaatggagaggatcagaattgcaacagtcaatcagagataatattagaaccctgagtaaattgacagaatcaatgaggagagactccttgtctcaactgtctctgttttagggcatcggagtatagtggcatggctgagggcaagtggataccatcgggaaaataaggtgataggagacaaaagtataggaaggggcatgggaagacaaaaataaactgattatttattcatattaattatgacagttctacccctctccatccctctagaagccaagttggagaaggggagtcagcaatttgggagagatgctagttgaggtatatctaaaagcactaatgagtgaagacttgagaaaagggattaatcaggatgaattctcaccaaccatatattattttccgataacagtgtttggtagtgagggggatctattgctaggtaaaatacgatggattcaaggagcttactgtttgatgatagggcaagatgtgttcatggatactagattgagagtgagtgcatggtaagtgagtttagcagtcactccagcaacacagaggaggtaacaattcggcataaacatatgagaaagcttaggagcatacagtgtgttcaatgaagagtgagttcctttagttttcagagtagagggcatggaagataaaacttagttgtggatgataaggctgaagattatggctagacacagtgtgaagaggtcatggacagccagactaatcattcatgcttaattcagtatgcaatgaagagttcttgatgtgctctgtgtgtgtgtgtgtgtgtgtgtgtgtgtgtgtgtgtgtatctgtgtatgcactgttgagaaattagtccagtgatagttgtgaggagaattccactgaataatgacatgaagttcgggagctattgcagtagtctagatgagatacactgatgacctcaaaaaaagggatagctatgggagtggaaaggaaatttcagtctagatcagtaaatcttttgtatgcacttgggtgaattgttaaaaccagtgtgctgggccccacactcagagcttctgactcactaggtctggagtggagcacaagagtttgcatttctaacatttttctaggtcagattgatgctgaaggtctagggaccacgcttagagaactgctgctgcggagatatttagaggtagcctagagttaagtcattacatacaaggacccaagaagatgatgaattcaaaaatgactccaaatttaactctgattgactaggaaagtctgcatataaattccaataataggcctggtgcggtggctcacgcctgtaatcccaacactttgggaggccgctgcaggcagatcacctgacgtcaggagttgaagatcaacctggccaacatggcaaatccccttctctactaaaaatacaaaaattagctgggcatggtggtgggcgcctgtaatcccagctacttgggaggctgaggagggaaattgtttgaacccgggaggcggaggttgcagtgagccgagatcgcaccactgcaccccagcctgggcgacagagtgagattccatctcaaaaataaaaattaaaaaaaatttcaataataaaatatgcatcaagttatatttttattgttgtaatacttagctgcaaaataattttgactaaacaaactttaggtgtgtcatattaataaaggcaattattttactttttacaaaatattatgtaatttctacataaaatttgcttagattgtatttttctagagatttagatatacttcactgttctaaggagctgaaatgttaaattatttattctgaaattgatactaaccagaaaaaagtgaaattattttctctgactttgatcctttactaagacttatttgctataggatatatctggcatatgttctttaatttccatataggccttgaaaattgctgctaaaattcatgtagcagtttctatatatatgtattacaactgtaatatgagatttggacaatcgggcatcaaatacttaaatattcattgtttgattgctgcaataattgtaaattaccaagtttttttttttttttttttttttttttacttccattcagtgtcagaagatataaaagtaatcattctttggataagagactttcacaagtttataggaggctgtgagagagtcagtgaccttcccatgtaatgtagaatatataagaaaaagaaacacatgattgggcctaatctatcttaaaatatggttctatgtgtggaaaataattaagcagtgatttaattattttggctctcctaaacttcggtgggaaataaatgatgcattttataaatgtgatctagaaggtccaatgaagatgtattggattgaaaatttttaattaaagcttaattttctgtagtcagatttatcaatgcaaatacattgatattttgcagtctctttctgatcgtattataacttaacacctatgatggaaaataatattgtatcttaattggaacagtattcttgctatatatattctttaaattttaatttttttaatttttgtaggtacattgtaggtatatagatattcatttttagtaaaattttctataaaaacatgaaaactgagatgaagacttgtaaatattgcataatttgtagagcattaaatatgtaatatttacaactaatatcttcaggtaatagtaacagatcactagtcaaactgtataatatctgcaaattttattttactaaaatgaatcagaaaaatatgaacctaacaacataattcttatgttagcttattttttccacatgtgtaattggttatccctataacaaggttaagtccattgaaacttcgctaataaatccctttggtaaccatgtaaaatatttttaaagtagatgtgtaattgagtttggtgagcagtgtcatttgataaaactatctgggtcttgttagcataacatttgaaataattaaagctatttggtgaatcttgattgttctcctttgataaaggaaaattagtcccctgatcagtgtcagtagatgtaaagcaattttgctttggaccagagactttcagatatttataggaggttgtgagagtgtcagtgagttgaccaagttctcacagttagacagtgtggttagcaaatactagatctcagtccattgctttgtccacttcaatacactgactcagcatagtttactgcctctatttatgtcataaagtagtttttgttggtctactatgtgttagtataaacatacccaatttcacttcaaatacagtgatttcgttatactttttgtattaaaaatgacaagaacaaaaggtggtagggaggaagaaatggaagaaggaagggggaatggaagaaataaaactggaaaacaacctaagtaaatgaaaagaaagtttaaaatacaaaattgcttaaagtgttatgtttttacttttgtctgtctcccccatacattttagagttaaatgttttcctcttttaattcatttcctactccaaaaagtcatgtaatcatgaaatagggcaatattctaagttaaactttataaaaggtcgacagtaggaagcagattcttgacccacgaatatattttgcatccagttttaaaatgtgtaagcatgaaattaacctcatccatacaaaatcaattgaaatctactgggtaatatcctctaattagcctcacaaattagtcacattttcacatttttattatcaaagcattaaaggtaaaccagtactttatctattctcaaaagaatgcaaccaatgaaatgtcactatttggagtcaatttatttaatttaaaaataatatttcttacattttcttgtttgctctaataattttaaaataatagaataaataagtttataaaccatattttaaataatctttcttctagcatagatgtagtatctttccaatacacttatttgtttttgtaagttcttttcctctacagatagaatgatgtgaaataactcttcatatcatatcagtagtctgtcttttctgtactatagtgtgttacttgtccttgaaatttttcatcttggtttccatgaattctttatttttctatatcaatattgtaatgataaataaattttcaaagctgcagaatggaaaaaggagactgatggatttgaagcaattttaaaccaatctgtagcacttggattatttattttcaatttaggttttagtgtgatttgaatatagtggtaatttatcatgattattaagattccatagtccagattaacaaatgtttacttgctgtctgtgtaaacacagtcgttattatgctagtgtatctgtgcatgccaaagtaatatttaaccaaggaaagcttacattttaaaactaataaagtgtatctgagtaattttgaatgctttcaatttacaatgaatcagtttgtaattgatcttgcttttcttcagtctgttatcctttgttaacttgttataaaattcagctttaatgccaaaacttcaacaaagccttaaatttcattaatccttaaataatccaacaaagcacaattaatagttgttaagcaatttgaaacattaaaaaatcaaggaaaacaaagtgttgtctttctcggtttctctgtctcttctttatgtgtccatttatccatttattatacttccctgtcttctaatttatatgtattttgtatgactgcacagtcatgctaaagctcttaaaatgaaaaggtaagtaaaaaattaaaagtgtccaaaacctatgcttggtatacactttctcatgcaatattataacttttgtttgattattttctatataactaaaacctattttgtgtgcactgtctaacattgtgtgatttaattgtgattccagttcttttgtggtcatctatttcctttaaagtcaatagaagtaacttacccaataattaagatgatttatcagccattgctttcaactgttttagacaatttatcataattctgaattgaaaagcaggcatgatatactttgtgttttaaaatttggtgactcaagaatgagctgttaaattataaacgctttcttattacatgtttcctttataaagttgcataagaattccaagttacaaagacagggaagaccaaggaatgacatgtagaattttaattgggtgggaaagtgttttctgttttagaatgggcatagcctaatgctgaactagtgaactcttaagaaaagcaatgaatttttttcatctctttgtgtccaaagactattaatcatatggctgtcaaatggctggtgctatcttgccaataacatagctaaaacaattggtttgataaacttattttggttataaaattggtcactggttgattaaattaatatataggtagttctaaaactaccgattgatataataagcaccttttcctgtataaaataaaaggcagtgttttcactggaaaatagagtagtataagacatattgccaactttaaggatggaaaatttatttagagagacaagcatatatctttgaaagccaaataatattatattcctgtctataagaaagcagtgcaacacaagctgagatacacataaatgagaatagaaactcctgaaataacaggtcaatcccactcccgtaatttttcctataccccgaggactgcctgaaaatttcactcagaacacataatgcaagataataagaccgacgtaagaataatctaaattcaccacaagttataaacaaaacattactattttattcaaagtaattatgagatattagttctttacaatgttatgagtataatggttaatagagctctatactgcctaataaggtggtcatgaaccacatgtggccactgagctttagaaatttggctactccatgttaagatttataaataagtgtaaaatatgtgtgggttttgaagagaatataaaatgtaaaatattcatatttttgtattgattatgagtttatacaataatttggacatctcagtgaaatcagtaaaattaattttatctgttttttgttttttactatggcaactagaatatttaaaattacatatatggcatgtattatatttctattgagctgcactactataaaagttctacttgaatttagagacaagaacttactgtaaggttataaaattttaagaaaatgtctgtgtgaaaaggattttgttcctaaaatgtgactgaatacatcctcatctagtctctgcttataaacatttagcattacttgaaaatcagtgtttttaaaaaaattgcagtcctcatcagttgttcttatataaacctaaaatttaggctccaaataatttttgcccactgattttagttaatcactttgaaactacacaaaataaaactactcaaattcttaatcttcctaatttttttaaacaaaatgcacggtagtctttcattggaaaatttagaccctacacattgaactaaagaagtctaagtttccattatcttgcctgaataattagcacttcagtttttggtagtctctcccaaagctctttttacatcttcccccttttttgtgtttacctggtggtatcatgttgcttagcatttgggcagcagttaatatacatactcatataatgctaaccagtcaggtcttttgacatttctacatagaaattgtgttatttaaaattccatgtcactaaaaaagctccttgaaatgtctattttggccctcaatttttagtcttttgttcatttattttttcaggaaatatttacttatgaatatttactatgtaccagaaatgactgtaggttgaacatgagaaactcagctccataggatgtctagggaacacaccccactgactgtatctgtggtatgccttttctgtctccaaataattcctgattaaaaaaaaaaaactgcaccctgtaaactaaatgcaaggctgtgatatcactttttatattgccgcagataaattaatctgtagttttgttcttcaggattatgtaactctaccaaactggaatctaaaatcctccatgttcaccattacaatgttatgatttcatcaaatcccttggtaaaataaagactcattatatcaataagcatgtattttatcctttaaaaccatagatttcaaaggaggaagggcttgacctgagccaatggatgattaggattttgagaggatcaaaataagacccaagatttatagagcatgtatttatattggatggacacatagaagtttgagagaaaataatagtcaacatttattaagcttttattatataccagacaccattctaacatatttgatcttagtaatagccctgtgaggtagatattcatcttatctccatgttataaagaaactgaggttcaatgaggataaataacttgtctaagttccctcagctagtaaatggtagagcccagattcaatctatgcattttcatacagaagtttatgttcttcactagaagatgaaaagtattctaaggtcattgaaggaggcataacagaagatcaccaaatggcctgcaaaaaaaggtctatattaggaacacttacataaggctggcaagtctttggggcaagattaggagaagccttgactactgtgctggaggttggactttattctatttatactcaatagatgcaggaggttcttcagcaaataaatagcataatgaaagaaaggtttttgaaacatagtaagctgatcattgggcacaggctggaactggtttgactgaaaggagattttacatcttttcaaagcttattgccttagttttgtgtaaggaccaggaacgatggagtctctgggaatacaaagcaagtggatcatagcaagtcaattgacacttacttgatatttattagacattagagtgagatgttcaaaaatagcatgacttacgttttacgcctgaatgactgagagaaatggtcttccattaagagaactagggaagttagtattgtaagcagtttgcgggaaagataatgtgctccatactaggaatgtgaaacttcaggtgaaaattcagctggctattggagagtctagatgggaattcaaaagtcagataacagcttagggtgaagacttggaaggcataaaaaattgttaaattcgtagaaaattgtatcttaaattaatagaagttaaattcatggagagatgagctagagaagaagcagttggaataaaacaggtaaatctgactgtaaatagacctatgttcttctgacatccaagtacacaataaaagttattttcaacattatcattatgtattcacaaaatcacatagaacatagttgctttcattaaatattagcaaatgtgaacaaccatttaataacataaaatatcaccaaattgataattgtatagttatgattctaagggttgttaatctttttacttttaccgtcatctaaacagtgtatgattttattgtaccgtaattgctaataatacagacattgaaactttaagcatgtttgtaccactaccaatctatactggttcaaataacttatgatatttcaaatggcaaatgatcattaggatttaaaaactggtactgtaataggtcacttaaaattatctcataaatctttcaggggtgtgtagaagtacctagaagatatgtggttattcatgttgcatatgagaatcatgtcatcatgaatagaatttgattattcacttcttcaatagtgacagattattacctttagatatttagtttttcttctacacttatccgtattgttcaccagaagttgccatctaataaaaattcaacctcttcctgggaatgtgactggagaagggtaggtggggaccaaacttgatgaatgtaatcgtcttggcaaaagacacgggggtcattcctgaattggttttacaaaagtaaaatgttttagctctgaaagaaaatcagatttctgtatgtcatctatgggttttcaagagctatcccatataaaatatgttctagtgttttaatggaaagaaatacagcataaagattgagagagtatcaatgtattttattaacagaattttaatctaataactaaaccttgcccacttttttgaatatatatttgattttccatgtcttttcacttatcactccttttcaagggttttgtttagaaagtcaagagattttaaagttttcttagactggtcattatcagttcaaaagtaaagaaactgatgtttacaaggttgaaaagcatagattctttatgtgaaatatattaggttcattcgtttgaatttatttgcatcaccaaccaaactgttcctaaggcaagctaatggcattgtcttagaagagcatgcctgtcaattgtgctgtgctaaaaatgtcatttaaaacatctgagcagattgccatgtagtttttctaaggataagatgacaattctgcatttctacctgaggttactgttacttgataaatgaggcaatttctgatgagacatatttacccaaatgtatttatatcagaatatttaaaataaggtcaaatttgactttagaatattaaaaattagcccattcaaatgtatctgtaaattgactgttgttgatatcaccaaatgatgaattgtactatcttgcatgtatgttcagctctggtgatgtgaaatgtttctccttatttgcatcctcaggtacttttccagttgtatttcaaaacccttcataaaacataatatggaaacataatgcatgtgattagtttagcaacaggaggttgaataaatgtatttcttttggtttatgtttctaataaaaagtaattttgatttaaagtagcactatctttttttttaggcctccattcctttgaaggaattggagcagtttaactcagatatacaaaaattgcttgaaccactggaggctgaaattcagcagggggtgaatctgaaagaggaagacttcaataaagatatggtaaattggttgtgataaaagtgtgaatgaactaggagtggaaataaatatttggaaagaacttagataagtctccaactgaattttcagagcacatattacacattttatgattctaatgaattttataaatgcagaatattcttggccttttattacaaatgctgaattactatggtatggtaatataggagcacttacggtttctaataaatagcccagcaattttcttttgacctgacctacttttgaacttatcaagggcaaaatgtaattggaaaaaagagtcgaatcataaaataaactaaaaatttaataaaatactcaactatcatagatgactgacattttgtatcagcaatgtttttggtagtataacatttatttcaatgaagagagaataatgcataatatgaacattatttattacaatttcccacaaagttgttttaccaaatagttgtttagttagtacattatatgtctaaaatgtgtataaattcatgctgcttatttcatgggagtaaagaaatatgaccatgtgtgctcttcccaacctcagaatattctccttcaatcccaactaatttcaaagtatctactacatttctctctggcttgaatatttgtacatcacatccttattaactgactttttttttctctcttcatcctccttttcacaattttttcccctctttcactgccatcacctctgtggcattcttaacctttacaattaccagtgctagagccttctcagacaatgcttgaaagtgacatcagaagacaatatataaattttaggtaataagtgtgtgaagcaataggagaactattcccaccaatcttagttcccacttcctggagctgcctcaatcaatactccccatgtatggggtttggtggccttgccaactcagcttgtggaaagacggaagaggctttccaagttgctgagttacagcaatctctacttcaggtcaaagaagaaactagagggcaccaagatgaaaaaaagtactgattacctcttgggctgaccccaactctgccctagagccctcaactggtatagggaaagaagtgaagtgggttttttaattttttgttgtttttgtcctcagccctagaaaatgctacagacttttacaacaccttttaaaataagtaaagtcttttacagactataagtatatgatgtgtctatattatgataagtatataatgtgtctatattatgccgtatgtttctttagattattgaccagtctctgacaaaaataatccctttcccccatacaaaatgaatcagtcctcagttgcgtgttgaagtttatgcattatagatttaaatatataacatctaattccttgaattgtaatacacacatacaaatacttgtgacttttgaaatttattatttgttttccttatgtcatcagtgtaccttgagtaccattacaatgtgagactacttgatacaaagttttcacattctgagttgaaagaaagaaaactaaaggtgaaaaatcacatggtcatatatgcgactatattagaccagcatttattcaaaacattttatttctaagtaaagaaaattaagatattgttcttgcagcctaaaggaacaaaatacccattgaaaatgtttaaagccattttccagtccatattttagtattatttgatcgtatttaaattaacatgcatatatgacatattttagaaattatttgatggtaacttagcacatgatttttattaatatcctgatatttctcctattaatattgagcatttaggtttcagaaatgaagcaggagttattagataggaattagtgtacatttaaatcaaaatattttcatgtagttgtgtgttaatattttcagatttgctgttatctcagtcacaaatacacatctgtattcctttatggatcagttaacattataaatgataactttagctcatttctctaatgttttaatttctagaactacactaaaaaagccaaaagaatactttcacagtaattcatgacttgtctgacatgatgaagtaccacactcccccatctttctacaggtgcccctaaaaatgtgttctttacaactagatgggaggaaacttattttgaaacctcaagtaccaaatgtaaaagaaaggctatgagcacagtatcttataatagcattccatgaaagttttaaattggatttttgtgtgtgtttaaataacatgtcttattatctctgttaacaatgtacagctttttaaaaaccaaaatgaagactgtacttgttgtttttgatcagaatgaagacaatgagggtactgtaaaagaattgttgcaaagaggagacaacttacaacaaagaatcacagatgagagaaagcgagaggaaataaagataaaacagcagctgttacagacaaaacataatgctctcaaggtattagagctaaaattataatataccttgcctgtggtttttttttaatatatagggtaaaatataatgtgcattaataaaatctgcttcagacttagtcatcagaaactcactttttctgttcaatgtgtatgctttatttaacatttttgagtggtatttgattttgaacgatgtgttgcttaaaagttatggctttttaaagacatatttttctaagtagtaattgaaagatgggaatgcattcatagtacttatacatttaattttctaatgtgctttatttttatcagctactttatattgaaaaaaacctgcctaactgccagaataaccgatctacatgtatccattattcctgctttctttacttaattgattttgcttgcattaggtccaattttttggtaacctgatacttgtttaataagccctagattcttttatttatttttaaaactttattatgcctttaagaaagtcactctttgcaactatctacaaagtcaaatttcatttatgtaggaatcctaaaaaataatcttagtgcccttgaataagaactgctactttcatattaagcagtgtagtgtatggcttcaagtccccaggtgactcatctggtttgtgcaggaagagcaggataaacttaatttttctataataatatctaggaagttcttgagactagacatgtggaaagttttgtgaaactttttttttgtatatgctttgcaataatcactatttgcatgcatggctgattttctaatacttttaattgctgagcttttccttgtaaatcactcttttgagctatgtagttatgaaggtggatccacctagcaggtagatggagtctgctttctacatgcaaataagagaataaaacctttccccctatagtcaaccaaataaacactgctgagaatgtaattacacaatattgtgcctgcaaggaatccacaaggaaagtctaattggccagcaggtgttctgaaggtaactgctgataaatatagtaaacagaaaaggcctcttcctcgagggagtgcaaaagcacaccataatgtgtctagaaaatcggaacgctatgtaactcacacccttccaactgtgagcaagctttcagaagtatctacactggtcgtatgatggtgtgtgtcctactgaatagcagtgtttaatggtcatctggcattcctctaaagaaatctacatgacatctctaaatattttacatattatacatcactttgtgcttaggaaatgaaagatgtttcagattgatgaccaccaagccctttctcctggcaaagatgtgagttatgtcacaaataaggcatggctcaactctaattcacgtggctgtatcttgctacctttgaaaaaagcagcgttcgatctgactcctcagaaggtttgaaaattcaacataaaacataaagtacagcaaggtttaaattcccaattttaaacaaactagataatgaaatgtagttcattcttgcaaatacaggctataagtgattaatcaaaatcgtcaacactactcgccaaaccaatctataccaacatattcaataactttttaaacctgtcaaatagttccaattctggtccttatgaaatattttagagaaggtcaaaattttccaatggaatgaaatttttagaaattccctgatatttattattttttcgctcgaattaaacctgtgaataaaaccctaattgctactttctgtagaaatgaaagctgcatgcagagcttatgttcccatgaattataaaatggcattttgagtaattctattaatcacagaagatattgagtgtgcttgtaaagagcatgatgactgatttcctcccattgttgatttattaaattagtcttatcacattgatttgaaagcatgcacttgctgttttcttttttcaaatagttaattgttttgcatttagagcatgatttggtatagtaagataaatgtggctatgcaagccttggaaggagaagcatttatctcacataattttttattagttatgttcaccaatatacgaacagtggtgacacttctacacatacagcttggaacagtttataagacaactaaaatggctttatatttctaatcataaaatattaatggcctatgaaactcttatgtaggcatttctaaaaacatgaatgtatattggttgagtacataaagttttgttgatgagccccaaggctaaagatatacattttagaattttacctattttaagtcagatacaaactcactaggtttgtgagtttgtatctagttaagtcaattgtattcgtatattaaactcttgcacataaactacacaacagttagctcattaagagtcaattgaatgtgacaaaatttttaagcaagtttgaacatgctaagagaaaatactttaagtgtgttattcaggtttcttagcttcctatacatgggtcccgcctcatgcataggcaatttaattatgtctttgtatattttgcatttaaatatgattttaacctaagttgtacaaaaagatgagggacgcaaattattttgataaataactgcagccagaagtgcactatacatatatattgatattttaataatgtctgcaccatgaacaggatttgaggtctcaaagaagaaaaaaggctctagaaatttctcatcagtggtatcagtacaagaggcaggctgatgatctcctgaaatgcttggatgacattgaaaaaaaattagccagcctacctgagcccagagatgaaaggaaaataaaggtaatgttgttttagaatgtcaataccagattttattatacagtttaattaacctgtgaagatcatatttaaaatgttgatgttcttgtttctattaacgttctctttgatttgatgcatttccttgtattgtgtgttgttttcagtaaatgtattgtattaagtgttattcaattgacgtaatgttgaatgaataaaatgttttagactatgtaaagtgatttaagaaatgtgatgtgttttctggtaaaattgtaattgactttgtgtatctttgttccagatgaactaatgacttatcggtatatggacgacttcttactcatgttagcccattcatttcatcagagcatcttcacacatcagtgttcactctctatagatttatttgcatattgtctaaatatgtttttttctgttattattttacactttttattttgcttcattctctgttgagttcctcaaacctttaaaaaggaaataaataacttattcacttaccctctaaattatattctatgtggacggtccctaataaataatgagttatcactccaaattgtttcaaatcccaagacaccagaggaatttagaagaaagaaaatgttagaccaatttcaatatttacttaattagaatatctaaaaccaagcattcaaaggataactgaaataatatttgggttattgagcgaggatgacagtcatgcctttcatatttgtaaacttcaaaggatgacaataaagggacaacagcctttgaaattttgagagaagtatttgctgcttgcaagtcggttgatgtggttagctaactgccctgggccctgtattggttttgctcaataggaaattgatcgggaattgcagaagaagaaagaggagctgaatgcagtgcgtaggcaagctgagggcttgtctgaggatggggccgcaatggcagtggagccaactcagatccagctcagcaagcgctggcgggaaattgagagcaaatttgctcagtttcgaagactcaactttgcacaaattgtgagttgttactggcaaacccacgtatgtgtttgcaactactactctattaacagaggcctactaataaaaaaaaaagagacaaaaaatctgggtacagttttaaacttctaatgtacattctgaaagtgagtggtttccctcactttgggcttctgtaacactagtgcttaattttgccaattaaagacacaagaaattaacagataacagggaaaaccccttatcaaaaatgaaaatacatcttaattttttttgctacatcatttttcataacattggcaatgttaatttgtcaatttatcatacattcactttacttcaatgtctaatccaaaaaatatgtattgctttcctgagatcatcccatgctgattttactttcttaatgtatacatgataaataataaatatttcatggtacatcttatgtcaacctgcataagccattatctcattgacttgaagaataatagcttaatcctcacacctggtttaactacttaatgggttacagtgcccataaaagaactggatgcctagtaagatggttgctaattgattgcagattgaacaatatcagataatgttattactgaaatgttaccagccaaaacaaaaaggagtgactgctcttctttcaaacaactgaatggaaagtgtatggttctctctttaaaaaggcgattcagaattgttagcttggtctcacttctttatttgtagtaggtataaaccatagaggttttctgacaggtacatttttgttcctattattaacacttgtaagatgaagaggaatgatcatcatctgtaattatagaagaaagtactcctcacaaaaccaggatgtcaaaatctggaaactaagtctttatagttaagttaggttgaattatatgaatcaaacagatactcaaccattttgccctatgtaaataataactgcatagggttcagcccatgtatgagacttcttgggaacttcttctgtgatagtgtcagttccatttaatttggtgtatatttttaaaatgtcaaaagcagttaccataacttaattttataagcatataagggaagtatgttgcatattattgtgacttcttttaatacttcaagaaaattaataaatacactgttttctgttaaatctaataccctaaagtttaatagcaggtgaattattctgagcaattggaagaatacgagaaatagcgaaactgtattgcatgtgaagtctaattccacctggctgaatgtttcagcctattatccttcatattagatgttatgaatgtaatgtgtcataaataaccttacactaaccagcaagcctgtgtctgcagatgcaaaatgaagcgaaagattaaggcaatcaaaaagaaaattctaataaaatagtttcacctcaatttaatagatcattcaagggggagtcctttgctttgaattatctgactactaactcatttctccattccaattttccccaggtcttgacacacccaatatgcaggtttaaaattcgttacaaactaatcaagttgctaatgctttatggctaaataggcacaggatcaaaaatctccataaaccacttacttaaaatgccattatgtccctattcatagtaggctctcaacaaatatttgtacaacgtaataatgactggtgaaataaaggaagcatgtgtgaaccagtatatatttttaaaaaattgtagtaaaattctgggatatattttcctcataaacgatttattcttaagttttatatattaaagatccaaaattcagaatgtgaagggggctatttttgtgttaactcttaattatccatgataataaagtaatcacaatctgtatgaagaataatcaatttaatattgcagttatatttggcatcgtattttaattagaactgagggataattgatagatgataagtaggtatataggttggtaggtagatagatagacaggtgggtgtagaaatattcaagatacatctttatacttgaccaattgtcaatgcattttaaaactaatttcactgtggccactgattagagttatctttcccaattcttacgccctagagtcatttgtgatagtcacagtaacagcttaatgaaaagtagtatttgatataaccttacaatggctctgatgcagcatatgccatagcttcagaatttcttacctccccctatattctccttctctaattgtttgatttttacttttcctaactgtccctttttgtttttctagatataaactgtaggcttaaagttcatctttcatgtctttacagcaacatgttgaaatagtaagcggtactcttaaaatgcttagtatgtgagagctgagtgagtttaaaatgaaaaattaattttccttatctcacagataaagactcagagaagtgctaaccactgtaaaattaaggcatttaggggactctgtccatgtcagagctatatatggtagtaataaagctcagaaaaggactgagactttgagggaacaatcatgaggcagcgcccagccacacaggaatgcagaccaaagcatagtagagggtatctgcaaattgtggtcctcagggcaaacctggagatgataaagaaagaggcatgagactgggaggacgcaggtaaaaattttaccagatattcaaaatgagagaactcctgccttaattaggaattccaatcatttctaatatatttcctgttggtttagaaactaggttcctcagttaagaccaagcacggactgtaaactgaggaaaagggatagttctataggatgtactatcacagcagtgtggtctagtaaaattaactcttggataaacagccttgaatatgaatcccagtgactttgagtgctgtatgatcagggataaactgagtctcatttacttcatctgtacaatagagataaggatgtttctgaggattaaataaggtaatatttgtcaaacacctgctgcgttatgcaggctcaatgcatgaaagttttcttcgtctcctttctgtatatatattaacattggaaaatagacataatctttaatttttaaaatattttcataagtcattaagagaattaagtacgcagcatttgtttaaaatgttaacaacagatatctcgttcagtgaaaatttcaaatttaattctataatatataagcagatacttttctctagattcacagaataaacacaggaaatatcacacaaatctgatgactgccaagaaagggcatgattttccctaaactgcccctcacatcattgtagcatttggaaaataacctcagagagcccaggcatttgcaaacacaaaattatacaatgaagataccactacaacccccaagggtcatgtgaaactgctaaggaacataagcttacaaactaaaattatgattattgtggaaaaaaattataagcaatgttatcagatgccaaacgttaaaaggagaatgtatacctgaagaaaatagagataagaggataatcaccaaaggatattaagtaatttttaatgttcaaaaataaaaattaaatggatttttttccagtaagaataggccattatataaagtgaaaacgaagatttgaaaaaacaaagtctggaaatgaaaatataattaatccctcaaacatctgcgtgaaataagtttcaagttgaaaaaaatagggattatggggaagagacaatatttcatattaatgaaatttaataaaatggaataaatgtaaattttaatgaatcctcaaattcaataaaggtcaaccaacgtggaaaaaataaaaacaagtctaccagctagctctgaatgaaactcagagcatcagtaatcaaaaaggtatcattaagggttacttaagacaaaagaacatttacaggatgacaatattgactgaagacttttcatcaacaatagatattagaagacagttgaataatatcttcaaaatgctaggcacattttcaaataccaggtaaaacatgattcaagaattaaggcaaaatattctcagacatacagctagtttcacctgaacaaaaactaagaatttcttgtctatagatttttgctaaaataattactaagcaatatatttgtgtaaaataaaatgaaactagaaggaaggagacagcgatgtaaagctgtataaaattgttttctctgtaaataagaacatttattaaaaaagcttataatcctaaaatttggtcagtgccaccaaggaaaacacagaatactaggagaatgcagtgtttgactgatcctgtgtaaagagagagaaatcaaatagaagacttattgcatatcctatgaattacatatccttaattcatatcctgcatattacatatgctatgtaaagggagataaaaacaagacttattcgagataatggcaacaaatataaggcttgtgcataatgtgttctatgtaaattattaccaattataatgtttctagatagcaaaaaagtgctaaacctctgaaatatgtatacatacatgacctttccaagaacagcagcaaaaaaatacaaaaaaaagcccacttcagtgaagaaaaagaaatgtccattttctaaatacatttccacttgagctgagcatgttatgacatcaaataccaagtatatgatcttgatgtttaacattttatatccaacagtctcttatcttggatgcctaatgagcatctcaaacatacaatagccaagtgaaaaataaatgatccaccccccatctacgttaattggcatctaccaacatctccagatgttattaaattgcactattatttacttaagtcagaaacctagacatccttcatgattcttttctcttacattaccatgtaaattatttccactcttgttggatatacctgcaaaatgcatcaaatcactcctccgtatctgttatggaagtgctaatctacaagattattatctctcatctggattacttcaacaacctctaacctcttcttccagtctttccccacttacaccatatttctcctggtgaaggcagagagctccttctaaggagttaatgagatcatatcaggcccctcctgcccattactctttaaatgaaatcctgtgatccgctatatgatgtagccccttcctatcacttctgttactcacactttgtctccctttttgctcttctgctaacatagaggcctaaaggtttcttttctatacttaaacacaaccaatttcatttccatatcagtatctttgaacatatttttctaatggaatatttttcacctagaattttgcataggtgctataacttatttagatatcctttcatttaggaacaatgaatatttagtagaactttgatgtataatctggttatgtaatgtagtagtttctgttataaatgttttatattccctatacttatgtatgcaaattcggagtttaagactgctcgttcagaacatcagtttctcttacggttacttctagaagtaggcatactaaggaaagacacagcttctggaacataaaagtgaggtggtaaaagatgaatatgaagagggttacaatattgtattgcaatggatagcttgtcctacagcagagtaattgtaatgggatattttgacaaaattaaagtacacatttccaaaatatacatgctcttggaaggctgatagaaaattaaccttgtttgtagattaaatgctgcaataaatgtgttatttaaaatagtccttggctgggcgtggtggctcacaactgtaatcccagctctttgtgaggccgaggtgggcggatcacttgaggaggagttccagatcagcctggctaacatatataacatgtcatgtatatatatgacatgctatacatatatacacatgttatacacacacagataacatgttatacacgtatgcacatgttacatataacatatataacatgtacgtatacacacgttatatataacatgttatacacacgttatatataacgttatatatacacgttatatataacgttatatatacacgttatatataacgttatatatacacgttatatataacatgttatacacatatacacgttatatataacatacacgtatacacgttatatataacatacatatatacacgttatatgtataacatgttatatataacatgttatacacatataacgttgaatataacatgttatatatgcacgttatatataacatgttatacatatatacacgtgttatatataacatgttatacatatataacgttttatatatacatgttatgcctatatacacatgttctacgtatatacatgttatatatacatgttatgtatataacatgttatatgttatatatacatattatgtatatgttatgtatataacatgttatgtatatgttatgtatataacatgtttgttttataatgttttatatataacatacacatgttatgtatataacatgttatataacatatacacgttatatataacatgttttatatataacatacacatgttatatatataacatgtatatataaatgttataaatacatgttatatatacatgtatatacatatatacatccatatataacatatatatacaagttatatatatatgttatatatatgtattatatatgttttatatataaaattagccaggcttgctggcagttgcttgtaatccaagcttctcagaggctgaggcatgagaattgcttgaaactgggagacagaggttacagtcagcagggatcacaccactgcactacagcctgggcaacagattgagaccccgcctcaagaaaaaaaagtagtccttaattgaataaatttgtaaaataaacacctatatattgtgaatatttttccactaacttttttaagttgtttgaatctgaatagtattatacattcacaaagagttttcacatgcatctagtttgatcacagtaatgaccctctcaagtatcattttctttgtcattttactgtaagaaaaattagcataaatgaggttaagagatttgtccaaggatacatctgagaaatggaagacgccaaacttgaactcactgctttccaaaacatggtgggagttattaataaaaaaggaaaaaagtttcagtgtttaaacaattttggtaaacagtagattaagcaaactttccttactctataactttctagtgcgtttgatatgctaatgggattatgactttctatgaaggggttagattctatagactttcacatctagacagttgcagtagaaaagggaaatttgatttcagattgatgaaaggtttcttatttgagtgatggtgaaataagaatattctttagaaaaaaatgggaagaacatcaccgtatcattattcttctgttgtttgggatttccttaaatttaagcagagatgtacaagaaaagtaataacagaactgtttgccaccaccttatgtaaaataatgtctgagcctagatttaatggtctgctacacattttttatattgtctcctatcttgtaataaaagcaactcattttgagaataaaattaggggaaatatattgtctttgcataattgccacatagattttcttctttgccttgaaataacaacaaagattgtcagctgccagtgcaacatccttggagaatttgggaagataaatgattttcttatttagagacagaatgttctttagcaaatggaattgtaaatacaaaagactaataatggttgttaagggaaatgttgcaccaggatgtagctgtttgtagaatttttctcctctcagctcaattttgtaattaacatattacaaggattaaaaaagaaattagctaacattttatgtttttctagattgttgatgatcatagtggttataaatatttgtacggagtttttttgttctagtgtctagttgtgtagcataatcagtttaatggttaagtagaggcatgttcagcgagtatcagcttccagaaagatgacagactgacttaattcctcaccccctcacttcaaatgcgtggaaattctgaataaaatataatttttaaaagttttaaatacacagctgggctatggtggaacctctcttccctctgtgtgccatgaatgatcaaatcatcttacgtgaaactgaacctggattgagagcctaatggctaggaagaagttttcaagaccttttaggacaaaatatgtgaccttcaacaacacataatatagaggtgaaaataaaacccctccttaaagtctgaattttcaagggcttccctcagctgtaaaggggaataaataaatcctacccacaatggagaagaggcattatctgtagtgataatagcttaggattttcaaaacttaatagaaattccaatactccgattgggaaactgagcaaatctgaagcagaaaagattattaaaaaaaagaaatataagtatagatcatcactatgagacgatgaatctgatgaatccaaaaaaagcaaagaaataattttaaatactgctgtatttccttagaaagtagtgacacttaaaatggtacctggttttagagcaatgatagaagccagaagacggtagaataatattttcaaaaacaatgaaagaacatccacgtaggaacctagaattgtgtactgatagaaactctctttcaggaataacattgaaataaagatcttttcagacacacagaaaccgtttactagcataaaattccctttagaggacgtcaagattggtctttaagcaggagaaagatacaagatggaagatttaagctgcaaaagaaaatgatgtgcaaagaaaatggtaaaaaaatggaaaagtcttaaataaacatttaccgtgtatgaaagtgtctattaaaaaacagaaaaatgctggacatcaatgaaacatgagaaggtggttaagtttttcatccagtttacctgctacctttctatgtattgtttctcagtttccataggtagtacctacttctctaatgctgaaatgcctcagtgctcagtccttgggcacttgccatttttatttattctatatatgtcttgctgttttcatccagcctcgtgacttgattaaaacaaaattattcttttcccctcaaatgcagtggaagcaccgttctttcaaattttcagagaaaaaaaaaaatctacgcatgctttctttagcctatctctacacaatacacagggacaacatttgaaaaatataaaccatatttaaatctgatcataatccttcaatgaattcccatctatttttaagtgaaatccaaaactcttcatgaatttcaagggatatctgacctggctggcccacttcttaactcaggccttatctcttaatactttcctctgctccacctatgttgacccctttgctgctgctttcacagatctgacatgcacccattgcattgtgtgctacctctgcctaaaataatcctcccccgtttctccatgtggctcttttcgtttctgccttaacttctttactcaaaagtgtttttttcaatgaatctttctcatgtgtgcacatacaccacacacacacacacacacacacacacacactttttatccatgctttcctcatttatttttctcaataaagtgcatgaccaggaaagttctcaatattttccttctttatcttcttgagtatttatttccctacctagaagtagagctccaacccaacaatgcaaaaaaaaattgtctttttttcccactgctgtgtcctcaacacccaaaacagtgactaggtacacagtatatatttgtttaattcataaaataagtaattaatcaataatgaataaagcaattttaagattctcttagtgcttagaatgaaaacttgcaaaatttcttgtgcgtgttaagaattttatactaatcattaaatcgatagaagtatacaatttttgaatagtagagggaaaaataaagacaagctattaagttaaagcaaataatccaaatagaaaactgaggtttaagaacattaattgaattcatcaagggtagtaagaaactatatgaacataggattttgtgttttccgaatatctctagtccaaagccatcactatgtataaaataagatgttaattacagtttaatattcttgtaagtttaagcaaatttaccatttatacgtgatttatacaacatattacctcttgaatattgtctcaaatgactggcttcaagtagcacgttaaataaaaatagtagaataaatgtgtcaagctacacttactattcacaattattttatagttagattatggctctgttagatatacaattttatatttgcttatcttctgaattaatgttacagtaatagactacagtcatcatgcaatgtgttgtcaaatatattaataaacataagaaaaaacatagtaatatactgtgtcaaatttttctatcaagtggaaatttagcacattcttcaggaaatattgactgcaaaatctatgattaatatatttttcagaaatattggatataaatacaaaatgaagtgatgaattattgatatgtgcagttttactatcatataatgttactgataaaattaaaaaaatataactcatttttagcatcagatgaggaaacttggttcactaaagttagtattatctttatttgaatgctacaaccttgaaaaattattacatttgatagaactatttgggaacagtttgttacttctcattgtgactatggacattaatgggatgcccatattccttccattcccttttcttagcatagtggaaatgattacagatatcagttatgtttcttgactgatgttacagtcattccgcattatgaagtatgcaagactaaatttttacaaagggtatctcttatccttatgatagcctaaaaaggtgaaaatttgtcaagcaggtttcctaagatcctataaaattaggggacagggttccagcatcaagatgtagttttacttattgaattaacacagagttttgttgatgattttctttgatgatgggggtagtgatcgtggtattgttttattacattggtttcttcctttttttgttcatttttaatgggaacctcccaataatggtgaggatgcagttaaatggtaactccatacacttagtgtgagtctagaaataaattcaagttttattttgaatacactgaattggtatttctttcattgaataaacatttatctagtgcctcctaagtgccagacaacacaaaacgtaaaataccattggcaaatccatagcaatcatacaaaagacgtgatatttgataaatataactcatacaatgaagaaaaaaaagaacaagaatttatacacagcaatttgacctccgtttgcaacacaacaatataaagtgtaattttctccaatctaaatttgctttgaaaatatggaacaccagctggaagggagctcagatggcttctgcagtggggttggaaatatccttctgagcatgtccagaacaactggttaaaaataattaaatcacttgcaccatctgtgaatcattctgattcttcaatgattacttaagactctcattgtatggaacatattctgagaacagatgaataaaatctattcaagtgtatattgttttccactttgattttcacaaaataaaaggattataatattttcaagttggtaagttatctgataattctcctgccctcctttatgatccagttgcttttgaaataattaaggtttgtttaaaatttagttttatgaataatacaaattcacatagccttgatgttataacataattttgcttaaaaacattctatcatttttaccctttatttaatcttttgagtatagtttagcacccatttagtaacagccaagagaactaaatggaagtccgaattgattgcattctcaaatttagcaccatatgctataatcatgagcagtttttaaaattcctaaatagctattttaacgcatgtaaaacagaggaaagctatatttagtggtgactaatccatggatgaaagatgcatggattaaatataatccaagtgcccatatctgtacaaacttaagatgttcagataatttggaggcattgttaactgtttttctggatatcagtgcatgggcacttctcgccagaataaattaactggggaaagttccagaaggtccataattttccataataattagtgctttcttagttaatagactatctgggtgatgaaaaataaatgaattacctaacaaatacagttatctataacatataactccatctgtgacccgtataaagctcaaaatgtgttaactggttagtatctagacaatcataaacacacatgaaacatgaataatatcggtcactatattttcatttcttgcttcgtagatacactcgagtatttcatatgtggaaaattaagagatctagtcctcttcatatattggcctccctaatgggaaagggtctctttaatctgctacaaagccctcctcttctttaaacttgccaagatgtcttctacctcaggtcattgcaattatgtttcctttgacttgggcctctatttctggatatttccttgctggtctcccgtcacattgcaggatgcagagtgaacattatctccacaggtggcctgccttcgacaacctattttatgtcgttcgccacatccattctatccttaccatcatgctctagaacatcagctagacgtttcccttctaatatttactgcaatctgcaaatgttacctttgcatgtttacttgtttataatttgtctgctatcattagaatgtaggcttgatgaagtcaggagcctattctatcttgttagtcactgtttccccaagacatagagtctatcacagagcaggtatttaatgaaaatatgtggaatgaatgattgaatgaatgaatgtataacatcttcctgtggaaatccctgcagtttcagagttggttgttctgtatttttatgtcagtggtatcctaatgccagtctgccatggtccagaagttttcaatggtccataaggaaaagaaaaaaaagagcaattttttatttagcttttcataaagcaaagttttttaatgcaagaattgtcctttctttcaaaattatgggtttcaacagttttggaggtattaaaatggcctttctttttctttcttctcattttgttacaatgtcctttactagaaaaagtaaagggcagaacttttgtgatgttccctaatagttttttttttttgtaatgttgttattgacctatgaaatacaatgtccgtaaaccaccaacttagataaatttatttacatgaaggaataccattcctgctaagtttctatattggttgcttgaagtttcagaatgaggaagagaaagcatgaaaaccatcacctcctatatgtatggcctgttcggcaagcagtactggccccataacagttatccactggaataacattcttgaatttattttgtcacatgtgaggagcaaaaacaagacaaaatacacaaaaaagagtagaattagggtatcacgacatttgtctaacattgttcaacgttaacacttacaaataataaaggtaccaaaatggtattttcttgtgtataaatattttcatcctctggatttgaatctgtttttgtttgttttggtgatataaagaactcataatagtatcatttcctgatgatatttggaatccaaaaattaattcaaaacagaagtattacattttctgtccttttcataattgtaaacaatgcatcaagatcaaaaacttaacaaaatgcgttaatgttattatgcatgcttttttcacattctttatttcccagtgatcataatgactaataattaacataattatttgtgattgacaaaagactctaacgttcatcattttagttaattattatttaagaaataattggtctggatataatataagccaattaaatttgtattctgaaaagttttgagaagtgaaaaaaaatttattttttatttggtaaaatactttatttctgttgtagctgcttttacaaggagattgtggggaggaacagtcatatccaagttctcagttaattaccttttcaaaatatatgatctaaaatggagtgaaaattgattgtgtcaatatgagtttttagagttaaaacttgtaaattttctggacagaatagaacaattttatattggaatccttgccataggataatacaatgactattatttcctggaacattgacagagaacaagctattttaggagaaactatctggattgtaaagtagagcacattaagcctaaggtgtcattaaattcacaaaacttttaaaaaagaattgagcgtaatctttggtaagagaaaaatggttttcttcagtgactattaccatattttgcaaagttataacctggcaaaatatattattttgggaaaataatattaaatataaccatttctatacacacagtggcactttatttattcagaggtcagatggatatcattttaatttacctgcaacacagccaagagtcaggaatggagtagaacaaaaggcctctcgattcccaaaattgattttttaaggttcatgaaatccaaagcttacttatatttcattatgaaatgaatttccaaatccttttttggagattttttaaaaattttgctttgattaaagaggtaattctaataaacttaattatctctttttttttttgtgcccctagtagctttgaagtcaaaatgggacagaaggaataaatgactgaaacaggagataatagctgcagcctcgagtaaggtgaaaaagaacctatatatatggactcatagtttggggaaataatttagcacagggcaacacagatgagagagggagggatggaggaagggagacagagagagagaacagataattagtgtttatttcattttatacttatggataatttaattatttcaatagtttattcatatagttaggtaaatactttttttttttttttgagacagattctcaccctgtcacccaggctggagtgcagtggcatgatctcggctcactgcaccctctgtctcccaggttcaagtgattctcctgcctcaacctccagagttgctgggattacaggcaaccgccatcacgcctggctaatttttttatttttttagtacagacagggtttcaccatgttgtccaggcttgtcttgaactcctgacctcaaatgatctgcctgcctcggcctcccaaagtgctgggattactggtgtgagccatggcgcccagcccaaggatctttaatatcttacctatgtgcaaaagtgtttaatacataatgccatatggcatattagcttcctaaatcacataccactgccaccagctaacttatatctctatatttacatctgaggctgcataggcacacataaatgtattcatatatgttacacatatgcttatttatgtagctatgctatatgttatttgctatttacatctattaagttacttagcaaaatatgtcctttggctttgaaaaaaatgcctgctgaactcatcaagattatgatttttgtaggttattctccatcttttagtcgagttcctaaagttgtgtttttttaactgcctgctttttattgcaggtatatgaaattgttgtgcatatttcaaagaagaatagaatgcagggtaactctcaaacttgttatttggaattaggtcagataattttgtaaatactgttatcagtatatcacaatgtcattagtgtcccttcaagttaagggcatggaaataaagatggtctaatgtgccaggccaaagaggaaaacttttcagcttagcaaagtgacttcaaatacatggggagaattgaagcagtcatttcaaatgcaaacaaaaagttgtatttttatggattacaatatccttagctaaatgtttactttggcttgggtatttttctcattagtgatacttatttaattagttgcttataaattgaacctgggaagtgtagtttgcagtgagccgagatcaagccactgcactccagcctgggcaacagagcgagactccgtctcaaaaaaaaaaaaaaaaaaaattgagtacttaagatcaattaaaatatatcgagtattggatgctgtcacataagagtgctattagccattggctgttaaatttcctcatctccaggaatctcaggcacctaaaaataattctctttacttcatgggcaacagcagccactagtctttgccacgactcttctgtcaattgggtatgcagtgaggggcaccaatatggttttaggtgatgatgtgaaattgtttcaaaatgctttcattctcccttctgaattttgtcttagtctatgcttccataatattgggagccaattagtagtacatgccttcctgcagcttgaatagaagtgaagtctattatgaacaataaagtcaattagagggggccatgcctactgataaatatgttatgtaaagactcaatttaccttgaaatctgtatctatttgcatctactctttagtgctagttcagagctctgtgcgattattttaaatgtattgcagtattactttaatcaattaatacaaaggtagattaaggaaactttactactcttcatttcttcattctgctgattcctccctcactgaagcaaaaaaaaagtctacaatttagtctttaaaaagtctatagtttagtcttagatatctctttgtactatattccatatactgttcattcttaccaatgaatagtatatatagatatattttacttttttaaaaaatactgctttattctgtgtattattttaaatataacagtcaattagaaacatgttcccaggtaatgtatatagatcttatacattctttgtgaaagtcttagatgatgaatcaaaatgtattctattattcttctacatttctggattattatattttgattagaaaaggtggcctatcaaatctttctttttgatgcttttaaaagtttcctctctatgtaatttttgatgtcccaagtaaataggagaatatgctttttccagtgtgcacaaaatacggattaaatttagcttgtcggttttaaaccacctctattcttgttttttatttgtattttttgtctattttaatctaacaaattacagaagagttgtatgtaaggtaccaactacagctatgattttatcatgttctccttttatttctagtaatttttaccttatgtagaatgcacccaattgtttggggcatagcaattaatgactactgtgctttgggaagaagtgtgatttttgtcattacaatggttctctgagacccatttagtgcttttcggtcttgaactatacttcatttgatgctattattttgactttcactttttaaaaaatggttttctaaatcaccattaacgcagcattgtgaccttgtatttttatgtttcttgtgactttcactttttaaaaaatggttttctaaatcaccattaacgcagcattgtgaccttgtatttttatgtttcttgtaaacagcctatagatggagtgtgcattttaaactagataattttgtctttttaacttatgcaaatatttttacatctttatagggtacatgtaatattttgctacatgcatagaatgtataatgattaagtcaggatagttagggtatccatcatctcaagtatttatcatttatatgtgttggaaatagttcaactcctctcttctaggtattttgagagatacaatatattgttgattatagtcaccctactcttctttcaaacattagcacttactctttctatgcaactgtatgtccgtacccagtaaccaatctctcttcacccattccgcccacctacactcttcccagcctctggtatctataaaaaaaaatcacatattcttaccaatacgtgcttgatcttatgaagatataaaaatgatagatagttcatctttagatgagacattttaaccaacttcatttttacaataactcttataactgtgtctgttttaattccttgtcatattgatggtcattattttatcattttatttactcttatcccttgtctataattttataattcatcatcttcttcactgcactctactgcatctcttcccgcacttataggttatttataagttatactttgtactatcattttactagtgctgtttcccattttaaacaacaattttatgcctatatttctgtagtgttgcgccaaaattaaataagaacaatgccctcatcaccaagatgatttacttagtcaactcctcattattttcaatcaaaggcaaaatcctttaaaaagaaataatttataattttatttcctggctactattgttttcacttgtagtatcacatactagttcaagatgtcatgttattacttaaattacactatcacttcataaaatttgaccacaaacgacacaaggtgtatttcctgtcactgtttttttgtaccgtttatttctcattgttttgaaatctttattacacagtcatccttcagtgtctgtggggcactggtttcagcattttgatatcaaaattcaagaatactcaaattatttatataaaatggcatagtgtttgcatgtaactatggacaccctcctgaacacttcatatcatctctagattatttatagtacccaatacaatgtaaatgctatgtaaatagttgttatgcagtattgtttagggaataatggcaataaaaatgtctgtacatgttcagtgcagacacagccatccatgtatttttgcaaatgtgttcgatcgatgactggttaaatccacaaatgtggaacccatggatacagagggccaactgtacttcagttttaatttggttggaacacatgagaaatgtcctcgtaaaaacataaaggatgtaaactttgtaaaccttgcattttcgaaatgatctttgctttgcagtcatcatgatggatttattggatagtaacattctttaatatctctcctctttttttagtagtctctgtaggttatgaacaattgtcttccagtttccattgttttcttgtttcaactatcttcaagctactattgtttccagtgtaaagtctgattctagtccaagtatcatttatttgtatttaaccttttttctttctctcaaactctaaagttgctgtctgtcccatctattgaagtacagaaatttcattaagatataattttaaatgtttctaaatgtgtccctgtttattattttattttattttattttgtttttatttttgagacagggtcttgctattgcccaagctggagtgccgcgatgcaatcatagctcactgcagccaccaactcctaggctcaggagatcctattgcctcagcctctttagtggctgggactacaggccatcagtaccatgactggctaatttttaaaacatttgtttgtagagatgatgtgtcattatgttgcccaggctggtcttgaactcctggaatcaagtaatcttctcacctcagcctcctaaagtgctgggatttcagttgtgacccaccacttatttaattcttttttgcacttgggtaacgttttaaataaccaattaatattaataacttctttagctctggaaaattttctattatgattgttttaattattacaaatcttccatctcttcttttttctcattctggtacttatcattgcttaataggtatcttagatctgttctctaagtctcttattttttcactattaatgtcagtttatttctatttgtctttaaattgtgatatacttcttctggttgactgtaaagaacccatattttatttttagccatgatcattctcttttctaagttgtctattgttatttaaaaactaggtaacaggctttctgtgctctaatgttaaccttttaatgtttctaattttatttttattaaatgtaccttccgtatcttctagtatactacttgtatggactctcagctttgtctttctctccagccccttgtgtcttctgaaaaagcctttgctttattttctctcatgcctaagtcaaagaatgtaaaatgtcttggcgcaaatgcagttaaggttttgatattttgatgcatagtgattgattgagaagcaacatggatactggaagttttgttgttgttgttgttgttttgatctgatgaataattatttaacaagctgaaacctattcacaaaatttacatatgggaaaacatctctgatctcatggacaaggggtggaagtaaggctgtcctcaaccatgtagtacagccactctccagtaatgcctgcatgaaacaaactagcaggtactgacccccttcttaagtcaaacagatctccttaaatcaatggtctccaacagatcattccacatatatacttgaaaaccatcagatccatcatttctgtctcagatcgtgccaagatacacataactttgaaatatcaccagttcatcatcattctctcttcacctgcaatttttttttccataatttgaggtcctgatacatatattcttctaaattgtagcagttagttgtgattatcttgacgttgcatggactcagttcaaagtgaaacagaaaacatatctacgatgtgatttacccattctcaacatttctattttgtgtgtctgtatttgcacagacacgtacatacatacatgtgcatatatataattaataagctttgaccatataaataatgcaaattatgtataattcacaataataggtttttaaattaattatcttcagagttgagtgagattacttacagatttaggctgtgtctacctgaaaacaaaatacagtgtattagcaattcagtaaaatcaattggatatagaataataacaaattagttgagttttcaccttgtgacattttagtttggatttagtagcctgtctaaattacctttgtgaaaaaactaggctacaagtattttctgatagatataataccagcattagaattattcatataatcttagttttcacattatttaaaatagaacacattgttatattttaataagcaatttgaaaaagaaacaaatctttctttcttgtatgattgccattataaaagaatattaattgagtgctcattaggtaactttaaccacattaagtactagacagccctttggacagagactgagtagaataaaaaacgattacagaacatactttggtattaaccttttctataaataaaatgtattgtcattctctagattagcactgtcctatagaactttctgagatgatggcaatgttctatatctacactgtccaataaagtagctattgaggctactgagaacttaaaacatggctagtaaaaacagatgtactaagtttttaattgtatttgcttttaaataatttagatttacatttctttcgtcaagtgtagctaatgactaccatacgggatagtgtaattatatgcatctttactatcactcgcatttctaatgaagagaatacttccttgaaaaacataattatgacacatgcatatttagacatagatactgagttgccgcattaatctagagatagtgtccacattttctgaggggtgtgacaaatgtaatatagaaataaaagtgtgagtttattctgaaaaatctactcaagttgacagatccacaaggcaacagaagttaaaagcgatataggagggtgaaatataactgcagtatttaaggtctttccatacttattttttcttgtgttacttttattttcacactgaattaagtataagtatgtgtgtgaggtggagggagggttcgatttgcttgtcaacatacaaaaagattgctatagcaagtattcccaagctgaaattttggaatagcttaaaataaaaaatatatactagatatgtaaacgaaaacttttatgagaagagtttgggaagagttatcaaaggttaaaatgattttttgaatacaagtcttctcatacccttcaatttgctaatagacattatgatacccatgaagaagctaaaatcagtatatcttaatatcgtctatatgtcattacctcaaataattgcttatgtttgtattcaagtataatgagtcagattagtaactaaaagacaatttaaggacctaagcacgcatgtacaatagcatgtagctaatgtgctatgaattgaagaaatgcgacatagtgaaatcagatataccttttaaatctatgacaataaagattgcattataaaatgaagaaaatattcctgtttgaattctgaatattcctaaatataaattataaatgtaaatcccagcaattgtaaccacatatctatcttataattatcctgttaagttgatacttgttttttcattaatttatccaacaaatatttttgataacatactgtatgctaggtactaggcatgagtctttgctgcatttattttttgctgccttataagttggctagggtgtataaccttatctattaatttataggttattttttggagatggttttacaaagcaggccatgattgttggtgcttatatattgctgcttatgtgttgatacttatcttggtggcaaccaaagcccttttctttctcttctctcacaggccatacttagtgactaaaattttatcaagttactaatttatgttaattctttgaaaatctgtataaaaatgcaaatgttgtcctttgaaacgaaagactttaaaccactataagccattaacacattttccagattcagtttatcagcttaatttgatagtaattgagcttggccctgaggaattaggtaaatttcatggtgtagaaagtcagaatccacatgaggcaggtcaatgagcaggtctgtccagaccttttacataggacactatttatacctggccttctagaagcagggtgtatttaaagactggcaaatccagcatcatctgcatatctttttcgctgacagcctgccctgctttaaaaattaattctaactttagaaaataaataatatgggcataaaggatgattttctttcatattttaccttgactattttgtgtatgttagtgagttttattctttttaaacaaagggggtaaattgttcattgattctgaataattattctgagatggacaggccctttttttggttacatagcttcacataagcaattttttagatgatgcaataggaagggggaaatcacataagagcaaacactctctcattgctattttttctatgcacggtcataaccaatatgcttagactcattagattgattattcaacatctttctacccagtgacttgactaaaacagacaaaacgaagtactgtcagaatgctgttattgtcatgccattatatgtatccaaaacagtgacaacgcagattaaaaccatacccgtctcacctgcatcatgttgttttgtttttatgctttattgtttggggttttttaatcaccctggaccaatacaatatttttgcctaatttgtttgtgatttgcatttttatgcttacaatgcctattataattgtccaggagaaataaataaaaaatctctcaactttgtttattactgtaatgattcctagaaggaaacttgtctttctctgaagacttgtggggctaagagacagagctacttgtctaagacttaagtctttcccattgccttttcatttatgacccatcagaacctacttaaagcctgcagtcctattttggatttacatatcattgtgttattacttttaaataatccataatatttaagaatgtccctttgaggaaagataatcagatacaaactgacatactttcatattatggctcatagattttcatattatagctcacactaaatcattaataaatcttactttgaggatttgcttattttcatcttcattaacaccaacgcagttaaaaaaaaaaaggctccatcactattttactgtttttggtcaagataatagtctatttttgttacacttttgatgcattgatatatttttcatgtgccatatttatatgagatatatagttattttgtggcatatgtcataatcatatgtcatatagcacatttttcttcttgagtttctttgacctcataactcataaatgggccagtaacctcaatgcatttaaaggagaaagaagtcttttaaatcatggaggaaaacattttgtttaaaaacctagacataatgcaccatttgtttcaaaacaggattgcttttatcctttgcagttatggcccttcaagaaacaaattttatgtaatgaaaagaatgtgataacttaagtttcagatgaatgaaaatgtattcaaaactttgtgagtgatacctgtgcctatttacacagctcagaatcttaaaactgttttgactttaagtttagatcatacaaatcataattgtgttctataatagtcattaagcattgatcgaacttttcatttttaaataaaaataggcattttatggtttctttcacatatctttttgtttctagaaaatgaggctagtatattctttggggtatatatggttaaaaatgaaaataaacacaaagaaataaaatgaattaatcagattatagcatttccttgctaatgatgcatgagtatctataatgatataaggtggtaaagaacattaacaaaagcaagttgattttcaaaaggttagacgggatttgtacacatcagaactcagaaggataaaattattcaaggcagagttaatgaaattcaaatgaaaaggattaatctgaatgagtacctggattttgcataaagaagagaaaatgaacatgatatttctaattacactgatttttaaataactgtctgaaatttttattaaaccaaactgaaagtcattcaatggatgtagttttctcattatagattcgcatgactgtgtcaataggaatgctatacttttaaggaatagatagcaaactagatctccaaatgtctggttctcttttgattcaatttctggtagtttcttgtatatgaaaattacaaaaaagtctatatattaaacattattgtatatatcagattgctataataaatgagaatattcaaacttaataacacggaattttctagaaaatgagttcacagtttcccagtggtgtcaaaaagttattttggaatatttctatttctcaagaaagttcacaggatcaacccttagttttctctagtcagctgatctgtaccacttagtgtctgttatctgtgatgactggacactacgtatcaagatagtaaatctttcaatagatccgtcttcattaaatatatttaaagtataacattaaccttttagactttataacgtatagctgaactgttgcccataggtaattgtaatgagaagcatcttagaaattacaggtattctaatttatctttataatggaaagaaaaatttttgaaagattacttaattatcagtagttgaggatagaaatgatttttctcattcagatttttctaaagtaataaactatacctttttattgattatgttcaaccataagaattttaatatttctaagtgttctagaaaatgtgttcatgccatggctgagcatgtagggattatttccatgtattgacactggttgctctatggcttatttgtgacaatcttgaaaataatcacaatatgcatattattagagcattctcaacctgcagttcaatggctaatatttcttttaagagtatttcgatcaggttaataagagcttcttcattatttaaaagtttgtaaaaaatgatttctagaaccagatacagaattacaattatttgtcacttaggtatctaaaattttcttaaaaattgaactcttgtacagagagtaaaaggatgattaccagaaaaattggcaatttaaatagatgccacataacactcttctaaaagagattttctttgaaagataggtgaaaatggtttttagtttaatgttctgaagaatatttgttaaatcggtatataataatctatggtagacacatggggtcaggtggagagaagcttaacagatgagaagccagggtatggtgtgctgcctacattctttaagccctggtttaggactatgattaacactggatcttatttgctgagacacagaattctggtctgagagcacgaattattattttctaagtgaatctaatttttattttatccagtgtcactgaatgattttttctttttttttttaattatacttaagttctgggatacatgtacagaacgtgcaggtttgttgcataggtatacatgttccgtggtggtttgctgcacccatcaacctgtcatctacattaggtatttctcctaatgctatccctccccttgccccccacccgccaacaggcccctgcggccatatgttttcattgttcaactcccattatcagtgagaacatgcagtgtttggttttctgttcctgtgttagtttgctgagaatgacggtttctagtttcatccatgttcctgcaaaggacacgaactcattcttttttatggctgcatagtgtcccatggtgtatatgtgtcaattttctttatccagtctatcactggtgggcatttgggttggttgcaattctttgctattgtgaacagtgctgcaataaacatacgtgtgcatgtgtctttatagtaggatgatttataatcctttgggtatatatccagtaatgggattgctgggtcaaatggtatttctggttctagatccttgaggaatctgcacactgtcttccacaatggtggaactaatttacactcccaccaacagtgtaaaagagttcctatttctccacatcttctccagcatcagttgtttcctgactttttaatgatcgccattctaactggtgtgagatgctatctcgttgtggttttgacttgcatttctctaatgaccagtgatgatgaggtttttttcttatgtttgttggccgcgtaaatgtcttcttttgcgaagtgtctgttcatatcctttgcccactttctgatggggtcttttttttcttgtaaatttgtttaagttccttatagattctggataatagccctttgtcagatggatagattgcaaaagttttctctcattctgtaggttgcctgttgactctcatgatagggtcttttgctgtgctcttcagtttaattagatcccatttgtcaattttggcttttgttgctgttgcttttggtgttttagtcatgaagtctttgcccatgcctgtatcctgaatggtattgcctaggttttcttctagagtttttatggtttcaggtcttaggtttaagtctttaatccatcatgagttaatttttgtataaggtgtaagaaaggggtctagtttccgttttctgcatatggccagccagttttcccgacaccatttattaaatagggaatcttttccacattgcttgtttttgtcaggtttgtcaaagatcagatggttgtagatgtgtggtgatatttctgaggcctctgttctgttccgttggtctatatatctgttttgctatcagtataatctgttttggttactgtagcattatagtatagtttgaagtcaggtagcgtgatgcctccagctttgttattcttgcttaggattttcttggctatatgggcccttttttggttccatatgaaatgtaaagtagtttgttctaattctgtgaagaaagtcaatggtagcttgatgggagtagcattgaatctataaattactttgggcgctatggccattttcatgttattgattcttcctttccataagcatggaatgtttttccatttgtttgggtcctctcttatttccttgagcagtggtttgtagttctccttgaagaggcccttcacatcccttgcaagttgtattcctaggtattttattctctttgtagcaatttttaatgggagttctctcattatttggctctctgtctgttattggtttataggaatgcttgtgatttttgcacgttgattttgtatcctgagactttgctgaagttgcttatcagcttaaagagtttttgggctgagacgatggggttttctaaatatacaatcatgtcatctgcaaacagagataatttgacttcctctcttcctatttgaatatctttctttctttctcttgcctgattgccctggccaggacttccaatactatgttgaataggagtggtgagagagggcatccttgtcttgtgccagttttcaaagggaatgcttctagcttttgcccattcagtatgatactggctgtgggtttgtcataaatagctcttaatattttgagatttgtcccatcaataactagtttattgagtgtttttaacatgaaagggtgttgaatttatccaagaccttttctgcatctattgagataatcatgtggtttttttggtcattggttctgtttatgtgatgggttacatttattgatttgcgtatgttgaaccagctttgcatcccagggatgaagcctacttgattgtgatggatatgctttttaatgtgctactggatttggtttgccagtattttattgaggattttcttttttgttgtgtctttgccaggttttggtatcaggatgctgctggcctcataaaaagagttagggaagaatttattttcttttgtattgcttggaatagttttagagggaatggtaccagctcctctttgtatctctggtagaattcagctgtgaatccgtctggtcctgggcttttttttttttttttttttttggttcgtaggctattactgcctcaatttcagaacttgttattggtctattcagggattcaacttcttcctggtttagtcttgggagggtgtatgtgtccaggaatttatccattttttctagattttctagtttatttgcgtagaggtgttgatagtattctctgatggtagtttgtatttctgtgggatcggtggtgatatcccctttatcattttttattgtgcctctttgattcttttctcttttcttctttattagtctggctagtggtctatctattttgttaatcttttcaaaagaccagctcctggattcattggcaaatctcatttttatttaacgttcctttctgcaaataccaaaatagtcaaaatttgggtttgaaatttcatttaaggaagttaaatacaagttagcagacaaaagtgagtatattttgagtgtctttttcttcattatatttgaccatacagctaagtttcttgctggctataatccacaattactatatttattaagcaccaatatgaatttaagatagctgagagcatctcaaatgaaagtaatgaagactgagaaaactacatatcaaagaagaatcagaaaatagataaaaacatcttagaattatttttcttttaagaaaaagtgatgaggacatgcatcaaaacttttctgaattcccactgcttttgttaaggccacccagatttttttctaaatattttcaagatatgtccaattctgaaacaactcccttgattaaacaacaaaacaaattaataaataaatgaaaaactacaacttgtcttctacttactctgttcctgataacaaaaacctttgttttccaaaaacttacaggtgtaaaatgtatcattaaaggcagatttaattgcaccattaaataagtattataagaaatacgcttgctttagatgatgtgaagctatctttactgcaggggttatagcaactaacgtgaataagaaagacgagcttattaacttgtaaattttattaagaacaacataatggtcaccaaccaatgtaatgcgtgcaaaacacaagcttgtgttacttgtgctattgattctactgtttaatgtgtcagtgaaaatttcacattcaaatagcctgctgagttatttttcttttaaatgtgtaaaatgcttatgatgaaatagtgaaattaagaatttcttaagaaatctgttaaattctgaattttatttatcaaactctggctcaagtttctaatatccttttaaatgtaaatgagaaatatatatacattattccattgaacatgaaggaatgtgtgccatggatttggcccagatatacacaataaaacaaatgttgtaaaaggtataattatttaatagctaatttgtgcaattctgtgaatttgctatatcacaagtagatgagatatctaaattagaattacttcattttttatatcatgtaagaattgagtatgaaaatcctaggtcagagaaattaaaaacaaaacataaagtgaccagcttgtaaattttactcctctttgtgtggggttcagtctagtatccccaaagtccaatgtattacattactgcaaaaataagtatggtgttgtcataaaaggctgtgcagtaataaatggctacgttagcatgcttatcgtttgtacttccccagagaccctaccactgaaaccctcaggtgacctcatcaacaggcaggtggcagttgatcaattctagacaaagttattgggagaataatttcaattacaagaattttgctgcctatagtgtagacagaagagagcacaggtcatccatctttctgaatttgcctgccaagtagtatttattttttgctcttataaagaatagggaaagatgtattactgggaaactccaaaaggactctggagctggaaattctcatcatgtctagcacttggatcccagtcagaaaagtgtaggtgcaagagaagaggctagtgctcccttatatatcaggacattctggagttctttttaaaatataaattccgcagtcagttctgctcatatagcagcttcattagcagcttaacttagcaagagactagcaacaaaaacaggagctaatgtctagaatttggaggagaagagggcttaatacaaagttacataccagcctaactacttcgtatctgttgtatctcagtgaactttcctatagatacaggaaagttgcctgtgttaggaataaaacagatatgagtccccctcacccaatcccatatctagatttccaggaaaattagaattttaaatgccagttgcaaattagaattagaaatttaaatgccggttgcaaaaatcgtctttttcttaggataaaactactctccttatgacctcatggtctttcgtcttatatttatggtgctaatatgtgtgtgtcacttattatgaaatgcttttaacactttctggaaaaagtaggtatataattaataaatcaccgttttactagacttaccatcgtgaggttttgaatccattttcagcccagtttgtagattcaattgtcagctgtagaatgagacctatataaacttaatggaggaggtttcactgttaggaagctaaaaaaaattgttcttttgtatatctataccagcacactgtccgtgaagaaacgatgatggtgatgactgaagacatgcctttggaaatttcttatgtgccttctacttatttgactgaaatcactcatgtctcacaagccctattagaagtggaacaacttctcaatgctcctgacctctgtgctaaggactttgaagatctctttaagcaagaggagtctctgaaggtaaaaccaaagcactttcattcgtattttacaaggtgatcatactgatcattcatagtgccagaacaattgacttaaattgtatgcatcatgatggcattttgactttcacatggaattcttaaaaatacttgatagtgtggttggcttcagaaatctagggtagaaagacataagttagaaaatgtattttacaatatttagctttgagagacatcctaaaatgaagaaatgcacaaaaatgatcatttttacatgcagtagggacagaaaggaaccaccagtaaataaactttgatggaagaacagtttattcctagttaatggatgacttctgtttcattttccaaaaagggaaattagatttttcatttatatgtaatgtatattgtttttgttttatattttttatgtatacatattcaatttcaaattaatgtcaatacctgtgctataacatatggaataaaattgaatagaaatcaataaaatattttctttataactgccagttaaaggctaccaacaaaatccagctgttttcaaaccaccaacagcaagttactaaattctcaagtaaggcaaataatgatgatgaaataggctatgaatttcagaaggcagtgtctgaagataaatgaatgtaggatcaagaaaatgcacataataatgtgtctccagataattttcatgatcgtacattttacactcaaaatgaaatattatagtatacccagagcttggtattttcaaatgcaaacagtatgtgattataggcaaaagatgggtttgctatcagcagcacatattagctaaagtattttatactcaaatggtttcctggaagctcattctatatcacacatttgcctgtatgaatatacaaatggataaagctatttgtttgttttggaaatcggtgttgcagtatcttcagtgacttgactttaatatcttaacattatatcaaataagctataaaattacacagtaaaataagagcttcacagatctctggaactattccatccatgtcagtgtggcactgtttcttattctgtttgaagtaaaagtcaaatcacttattggtacaatgaagaaaagaaacctaatcagttaataaaataaagctgacatgccagaattcctgtcattatttctattaactaagttctcatggcagcatagtttgtaagtgcatcattgtcattcaataagtaaattattgccaatgagctaatatccattccttcccaggttcatggacatttggttcaggagagtagtgaccctgatcttattaagttgcccattgaataactctgtctccatacctcttagcctggcatactcagaatgttagacccttggctacactcacagtgaatcatttgttcatcctgatctatttaatattattatagctgatgtcaatcgtaatagtattgattactgcggtttataatatggtattattgtagatttaatttagctaaatggttgaatccccataagatacagttgtgggcatgattccttctgtctcccaacaaatctccagcaggtgaatgggcttcctaccttcattgacttttttgaagggggatagttttgagctcagtcttttcagtgaatatgtatttcctgttaaaggcattcatcattgtcattatccagtagtaaaaatggaaaagcagtgcataaattgtacagctgctggttgggaaggtttgaaattgtggttgattttattcctgacagatatgcatgaatcaaattacagaactatagtaagtattgctgtgctttaacatacatcttttttgaaagtgcagtacaacacaaataatatgtaatatgttaaaagaattactttctaaacaaaatacaactaaaatagcacgtatggtttcaatagatgtattgaattggaaagctacctaatcatgttgacagagactatgcagataaacacaaacatatatatatacgtatatatatatacatatgtggaaatctgcatttaatagcaaaaacactagctaaggcagagctagagaagaatgagaaacatacacataagtaatattttctttcttacttcagagccaatattaacagttaattgattgtgattgcttatatgtacaaagttaataatactcataacagacaagagtacataattttagaagaattgcaattttttggaagtttagagcaatattaacttgcatttcatttttaagaaaaaatcattttcatgataaaattttccaaaatataattactgtgttaaaccgtcaaatcctgccttaaagtatctcatatgaaagcatgaacacagaatttcttagcatcgtaagttttaaattaccaaaaggttttctctggagagagttaaatatttgaaagcttatcctaaaagcagaaatgatccacttaaaagacttaactgaaaggatttatcatcatgtgtccatatgcctaattttactgaaagcatcagttttattggaggatgaaacactcttgggatgtcacccatatcatttcctgactcagcatgccttgtactctgactggtagctgccagatccaagtgtctctgactgtttgccttagggctctctctagtaatcaaagctcatgagtgtcaggtagttaaagttctgcatcccccgtgttccccagcaaacctcaaccaataacaaataacttttggtggataaataccactactcactcattcttcagttagggtaactctgaagcatgatttatgctctgacccaaaattctgttccaggattaagaccccatcgcacacagtaaaaacctgcctcataggatacatttcacttgctccctgtcctaccttacacacactttactagcacctccttggatcattcccaaagacatcccttgtcttcgaatctgcttataggggaactctatctaggacatttttgaaataaataatgacatatttactgtgtagttagcatttacgtagagaaattcttagaaatagttcatgcctttggagtggaattcttcaagtgattctgctgctccctcattcagggaatccttagctgttcaattaggccttggtatcaataaatgtgaatttttaggacaaaaataagaacatagcttataataagaatgacaactatgctttaccttttgcaataatgagaatcaatttacagctaatattattctttatggtagagcagaatgtcttcacctgaagaacatgaacaagacaaggatatctgcccacatcccttcaatattccacattgcactggagtttcaaatcactgaaaggaggaggaaggaagggaggaagtaaggaagaaagagagtgagggaaggagggagggagaattgaagaaaagaaataaaataaggagagaaacaaggaggaaataaatggaaggaaagaaaaaatatcaggcacacatcatttcagttgtctcatcaaaaccaattatagtacagatgccttgtttggaatgaataaaatgtgctatactttgggtaaccaagagggtgatgaaaaacgtggccatatgaagaaagctcacgggtaggagacatggtggtcctaatgtagattttaaataggatcaagaaatagagacaacccttgttcaagttcgagaccacaagggaaagctggtagtgagcttataagccaaagatagtgtgaagccaggtcgttcaagtcctcttgagttcaggttttttgcattgctcttgagaaacaaaaaattgttaggacaagtaaacctaaggaatgtggattcgtatattccaaaaatagttattaagctcttagtatgtaccacacactattctaagtgcttataaaacagtgaaaaagactaacgaatctttgccctcattcagcttttattataacattgggagacagaatagaagcaagcaaacaaagaaaaatgataagtaaatattgcgtattactaggtgatacgtattttgggaaaaaaaaaaaaaccagaatctgttaaggggatataggaccactacaggggtagacgtaggtataattgaaagtggcggaattgccatttcaaatagggtagaaatgacctttgagcaaagattggaagaaggtaagggagtcagccatggagtctgtgtagaggaaatagagtagaggcccaaatgtgggactgagcttatcttaatcaagcaccaacaagaaggccaaagtggctgaagcaaaacaagccagtggaagggtagaaagagatgaggatatgggagttgtgagtgtccagattgtggagggcctttggggccattgtaaagaagattctaaatgagatgagagcaattgtaagtttctgagcagttgagtggcatgatctcaatcatgttttaaaaggatcacactggcttctgggttgagagtagaactgtaggggaccaataatagaatcaacaagagttgaaaaagagatgctggtggcttggacttggtcggtagtgagagaatgtcagattctggaaatattttgaaattagagatagcagatatatttctctggtcatacagaaacttaagcatgtgtctatgaaaacccattctcggccgacttggggctgagttagaactttggtctcgtaaaacctagcagaagatcccttgagagatgtatgatttcttctcatattttagtcttcgattcttcagtcttgccttgaagtagggacaaaagtactggcaacagagatttttaatacactggttaagatctttctcctctggaatctgtttcacagctcttaagcacaaatttaataatcccaattagttaaatgaaggcaaaattatgccatgagcaaagtgactgcttttctattctggtattaggagaattagataatagcaagaggcaccatatgtagaaatccaaacaaaatatctgaaggaaaataaaagaacgattgtttatatgcgtattgtaatacaggggcatattacattgtttatatgcatattgtaatacaggggtatttaataatattggaataagaggacattgcaattactctaaataatcatggatcatataaaatttcaaagcaaaatttgtttgcaaatgctttttgaattcgagttgaattttctaatagtttaatagttctaacagtttaatgcgtggaaaagatgatttttattaatacattgtgactttgtagaaactgatcttttgaactatacataaacatttgcaataatgtgatcagtggtttctcttagaaaaattgagtttttcaacacatttatttggttataaatataatttgtttcttcaacagcttatatgacttgggatttatttgattgatttgctatatataaatgtgtgtattttcaaatattaatcattaactgtagtttaaatcatgcttaaattatttccatagtacattatttttcatttgtattatatgaaaagatttgtactatagagaagagattatagatatttactgcctttcagtcatgcccagctcatatttatatgtgcttcggtacagttttcttttatattttatacaaatctctcttgtaggaaattatccattctttatccccaaccattattttatcaagcctagcagttgtcctaccttgactattatgctgcaatttactcccaactctgctaaaatgtactttaagaacgcactcctactccttccattctcccagcagcactgttttcataatccccatcgtgtaaagtgtagaaagcagaaacttccatattaaaacttacaaatcatgaggctggtagaaattttgaagttgcagttaagttgtggggaggttttccttttattcacaaacggttgaagctgtgcttcgaccagttataatgtcgttttttatgtgtgatatataattactgattcgttatttatgcaaagacaatgcatcatcctatgaagaatattttggtccaaatacgtagctgtgtttagaaagtgttttctcacatggggacaataaaccatgaagaaaaaattaaaaggtcaccttaccatagagccaccaaaaataactttttaactttttttggaagctccgtaaaacctagttaataagtactttaatgccttttgattgaacacagttcccaattcgatatgtcattaatgtagtgcctggtagctggatgggatgtgaagagtgtaagaattagatttatatagggtgttgcctttatctgtcagataaagacaaattccagagagtgaaaatgaactggagtttgagtctttggttctcttatttctctttttccattttaagatagatctactccccaacggccgctgtcacaacagttactaatgggtttttctaatccttttttcttagaaatgaaagttatgtgctcctctgttaaccaagttacaaagtgtctcaaggcatttctgatacctaaaactgcttaaagctattattttcaccttcccaaaatatgacgacaatagtgcctagagttttataagtctataaacactatacatgcatttaagtatatgtataacccatgtaactgcagtgctacatttttcaagaaggtgatacatacacacagccaccaggaagaaaaattagtatcttgtttgttgtttttttcctccaccactgtatctagaactcctagaacagcacctagcacttaaaggtactgaatgtacatctgttgaattagtgagtgatggtctgatacatgtaggtgtggactctgagatagaagaagacagggcagtgttagtaagcgctggtactaaaagagaaaaccaaatttacttctttttatattgtatcctaactcactgagttaaatcatctagacatgtgcattctacaaatctatatgcatataagcatgaagaaattgttctaggtttgtatatactgaatctaaaacaatcatttatgaaaatgtgtgacagggaacccacatataattaaaacattactaacatttttccacatcagtgagctttcattatgtggttatgataagcagtagagtagagagtttagcaaagtactgtattggaacctgaaaagcttagaaagatttaacctgattgttgatagttgtacccttgggcaagtaacataagatatttaggcctgttttttaacgttgaaattaaatcagtgataataactgcccctgcctactcaactgtactcttgtgaagatacagtgaaatcatgtacgactgtgtaggaaaattcctgttaaaatgtataattatataaatttcaagatttgtaaaatgcatattgcttcatcaaacatcccaaattctaagaaagttataaatttccacgtaaagtatcctaaaaacaaattacctttaagaatgtgttaaacattataaaattgcatatttatatcttaaaaaactgtaaataaaatgttaaccacataaaatatacgtaaagttatttccagatgtggcaaatattctaaagctaaaaaaactttaaaataagagaatacatacaagctaagccacgtttgcttttgacaaaatcttccttagaggatcttacaaacttttgatcatattcttctattgtacagaatgttccttgacttgtgatggggttatatccagataaacccattgtaagttgagaattttgtatgcggaaatgcattcaatacacttaacccaccaaatatcatggtttagcctagcttaccttaaacatgctctgaacacctatgttaacctacagttgcgcaaagtcatagaacacaagacctattttatagtaaagtgttgaatatctcattcaatttagtgaatactatactgaagtatggtttcgaatgaatgtatatcactttctcaccaccctaaagttgaaaaatcactaagtagaaacattataagacgggggccatgtgtatttccgaggctagttgttacttattcaggagtaatttttttattcttctatttatttaaggtataaaacaaataactcactttattgtatatttatcttgaggtgcagaaatgcaactctaaattattccaagattctgtgtaccataacttttaccaagaagaggatgctgttttctagcttggttttaattgttgttttattttgggctttagtttctttatgaaatgtgttgatttattttttccatttctagttcagtaacttaaaacccattgttctaattgtgagttcagaaccatgacaaaaattattgaaaaatattgaaactctaagcaaagaatgatttaatcagtagtgtttttttctcttttttgctttggagtcttgaaatttgcttttgttgtttattttttgttgtctttcctttgccatttaaaaaagttagtttgtatttattttctcctggttaaatttgtaaccatgaacatattaaaattataatgctattccattgaaccttatgaattgtcaagtctttcaaaaggtttaaatattggcaatatcttatagtttaatacaatgacttgtacccaagtctgcttatttctgaatattaatatatatcattaaacatcctgatggaaaaaaaacaagaactttctgttgtaaatcacgtatgattaacagacaccaattcccaaatttaatttgccaaaccacaggcaaaaattaaatagtgttatcagtaaggaaatctatggagcttccaaaaaggtaaacattgagtagagtgttagcttcctgctcccatatcatgccttttgtttatttcttttctttcttttttttttttttttagatgtatgcatttgggtacagaacaattgtatgaaagagcgattttgcttttctgtcccctgtgtaaaacaatatgatggaaagcacatttccccaacatcagaagtattagttatatataaaacgggcataatattaccaaatatgttttctgttttaccaaaatagtttactgtcatcaatattaatttttgcaggtttgattatattttatcatgtatggtagctacctatgaagttgcttaatcatttatactaaattttcatttatcaaaataataagatgctcatgattgcatatgtaaatagaattaaaaagtataacatgaattttaaaaaagcatattccattcattggtgatcatcagtttttgaggttttcttggattgttgtattgctttggaatttttcctccataaaacctacctggccctcctctgctgagtcacacaacactaaagcgtatcctgactctaagaaatttgggatcatagaatgccatatattttgaactaagagaaaagtacttacttctataaaaccccctttgccatgcatgtgagtcaatttttctatttggattttctgtaaaatgatttaggcgatgtgtacaacttaacacaaaatgtacgtatcataaaaggactggtaaaattgttttcaatttacttagtgctgatggactagaatcattttatctgagaaacacttggatcagtaaagtgcagggttttttttgttgttctttttgttcttgttgatgctctgtggcatctggagaaatgggcaggtgtaattctgaataaaggacttttttcttagatatctaatgtgctgtgaggaaaccataaggaaactcagccaggaaatgcatgtggacttctattccactgttcaacagctaatgtcttgtaaaagtaaagtagaataaacaaggaattacctgaatagctcacgtctgaccatacctgaatatctatctacaatggttgaacagagtaacaaatcttagaggttcaatgattgaattcaaattggattttcataagcaagttcaactcaactttttacttcaagtcaacagatatttattaatgctacaagtgctatgcttaacattctaaaagataagaaagaaatattaaggaataatccttgtactctggtagttgataacattattgaatatacatattatagttatacaaacaagttagagagtaataaagacattaaggacatcatccaagcaaaaatatataagacatgagtgtaactgaaatcatgaaaagaagaaagcagcacaaaaagcagaaactaggaggaattttatagaggaggaatccttagcttgaggtgtgaatataactggaatctggactaatcttgaatgtaatagctgacagttattatttttgtgccaggacacattctaaacacttagagtaacttgtatggtcatcataacagccctacaaggaaggctgtattattatacccatactcagatggagaaacggaggtcctgagcagttaagtgacttgctcaggtgagatcatttttaaatatcatagttgaagtcccactctggatgttcaagctccagagtttctgctcttaagcactacgctatacagtttcttgatgcagaaaatgttttcaaagttaaagatacaaagtcagtaagggtaaaaaaaaaaaaaattgtatcagaaggatgtgtctgaagaataacaaagagattaatccttcactttgttattcactttgattatcctttcaagtgtctctgctggcaaagcactaggaaatcaagttggataaaaactgtgaatccagttttttcttttttttcctggaaaaaaagatgggctaaaagatgggcttgaaagtgtccaaaaagctatatgtcatcatggatggattttggtcagggataatccttaaaatggcaggataaattggacacaaggaaaaataaagagataaaacaataagtaaggagatatttgtgttcagcatagctggaccgatttataaaccatacccttgattcagtagctgtaccaggactctcattattaaagttcactcaggagatgcccaacatcctagatcacccattttcctgtgttagtgcaaaatgtggactggatttcccgatacatatttctatctagttaaataaatactctgattggttaaggaaaggttttctggaaggtgtatataatcccaccatggcaacagaaccaagagtctctgactgtctaccaacctgtagacttgaattttttccctgtactttcttctagcttcttcgatttctgttatccccaaaacaccttgatgtagccttaagcagaatcaaccatcaaagggctaactccctcctcctgctgggtgccttctctgttgggccccagcagcagtgaatctatgctcccaacttgacatttttcttatcccctttcccacctcccctaaataaaattcctttgtgtcaaagtttgatttaagtgatagaaatggctaagattgtctacagggttgggtttggaagaaaagaggtctggaaagggaatatagcaaaacatcagtattttctgagcaagtttggaagagattaaaaattacccctagtgactctcaaatttatatctctagtcaagattcctctcctgaatcatgacatatatatatatgccttttatatattcacttagaagtataataaacatcttaaatttagcatgttaaaatcttacaccctaaccttatcctcctgcagttttctacactatagttaatggcaactccattattccacttgtctgtgccaaaattcttcatgttatccttaaggcctttctctaccaacacacatgtaattggccaccaaatcctaaggattctgcctttacaatgtatccggaattcaaccctgcctccactctgatccaaagcaccatcatctccagcatggatgattgcagttgtctattaacaagtttccccctcattgccttctcccctgtagactctactgtcaatatactagccagagatacctatttaaatggaaagtcagattatatccccctttctgcttctgttcaaaacccccaatgctccccatccccctcaaagtaaacagggaagtccttatgttcataagtaccttcatgggttacccaccccattctctgatatttctctggtagtcgctagctcatacactccagccataatcacttcctccatgttccttggccactcctccaggcacattccagtgtcagggcccttatacttgctttacctgtctggaatattattctcatgatttttctttcaatggttaatttctgcatttccttcagatctttacttaaaaactgccttcctggtaaggtcttccccgacccctcttacctaaaattctgacccccactttatccttcatttcttccttccctgctttagttttgctcctcagcacttaaccactatctaactgagtatatagtttagtcatttctctatttgtttactttattctcctgtagaaggtgagattccagagagcggggcttttgctttctggatcactagtatatacccaagatataatatatgactgtctcaggctgggcgcggtggctcacgcctgtaatcccagcactttgggaggccaaggcgggtgaccacagggtcaggagttcaataccagcctggccaacgtaatggaacccgatctctactaaaaatacaaaaaattagccgggcatggtggcgggcgcctgtaatcccagctactcgggaggctgaggcaggagaattgcttgaacctgggaggtggaggttgcagtgaacagagattgcgccactgcattccagcctgggtgacagagtgagactctgtctccaaaataaataaataaataataaataaataaataaataaataaataaataaataaaatatgactgtctcatggtaggttttttcaacaaatatttcttgagttaatgaatgaatacagcgatgtagctgtcagacacagagagagaaacctagaagatagtattactagttaaaactagtgtggctaggtctgtatgatgaaaactgtgcctaactgtactgaatcctgccaaggagggaaagatgaaatggggaagctattactaagtgagtgaataggaatttccttcaggaaataaatatggttaaaaatgtgaattataagtgcttccagctgtctgctaatgttagtccttcagagaaatgaaaactgagaaaccattagaaagcaattttatcacttcttttaaaaaataaagttcaatatatttcaaaccagaatatcatcgaaatactgaagtcattttcaggggaaaatgccctgaaacaacaatttcatattatcttatattttaacttatgcttttatacatttgaaattttatttcatttgaagacttttttctaattgaaatttttgactgagagaacactcacaacttctgatgtaaaattttattactgaggaaaaactgttaaacagaagacaaattagccaattaatgtttgtatatacatcccacagtggacatattatttaaaatcttggaaagagttgtagatttgtgaaggtatatgtgagcttatttctaggtatgaaataagggagcaaagacacttgtaaattatagacatccttatttagtaattggatgttgaagatgaagaaatggctgaattgaatgaccacagagacgggacagaggaagtgatgtttgtttgtttgtttaattgtttattgagacagagtttcactcttgttgcccaggctggagtgcggtggcacagtctcggctcactgcaacctccgcttcctggggtcaagtgattctcctaccttagcctcccaagtagctgggattacaggcgcccaccgccacacctggtgaatgtttgtatttttagtagagacagggtttcacatgttggtcaggctggtctcgaactcctgtcctaaagtgatccacctacctcggcctcccaaagtgctgggattacaggcgtgagccaccgcgcccggctgctattttaaataatagaactttggcacttttcacagtattcgggaagcaacgagctttgctataggtacaaaaatatatttaaaacttcagtaaattattttaagtttactttcatcaaaagtgattaacagtaagttcaatttgtcagatattactctcccctactctagttctcttcaggttctgcaatatctactttgacatttatacacataagtttaccatttagatggtaaaggcaggctctgcaatgaaaatctttgacagcaagggagtagttgtcactttacattaaatggaagaaaaactaaacagtagaagtctatcccttatgataaagaatggagcatagttaagggttgcttcatacctttatcttaaactgattagttggcaaataggtcccttgtttgtttcctagataaattttctgtattctctggcttctccttttatcctgttaaagacacatactccacaacacttgaataaacaaagcatttttatgttcaaattatttctgtatgtgtctcctttaaaaaccaattatcttcttaagggagagactcacattttaaagtctttattttcatatctcacatttgaggctgatattatgtctgtattatcaataaacacttatttaaacaataagcttttcaaacagataaatgaattgaagccacatggcttatagatttctgcttttccttactttaggtatctggatttcatctgccggttgtaaaagttactgtgctatctaatttttctctattcacagtgcataatcagggtcttctttaacttattggagactgtgaatcagagatgcaaatatcctattttaaaatattaaggactcgagttgtataaattcgtgtacagatgcctttcagaaattaaaattccatttgtatgtatatttagaatttccttttgcagaaagagtggccaaaaataaacatcttacagaatttcagcggaatagtgaagtggtcaattcataggggcatgtcaaaattaagaagggatttgactaaaaagttggtactttatcattttgacatcatattttcagataagataaggaactattcagggagagaaatagaaatgctatattctatagtgattctagggatgtttatatcgccatagcaactacaagggactatggcttcctttttagagggtcagaaactataaagatcacttatttctagacaaactaaaatagtaaaatactatcagagatctcatctctgactttaaactatggaaagtgctacagcattttctttggtgcacataccatttttctgtgtgcagtgccttgaggacacgaatatgtgcagggactttaaaaaggatgtatttcctggactccagccaattttgacagcattctctgagaatgcaccaaggagctattatctagatatccagggagtgtgacatcccctgccccagtttttgctttttgcttttctcctttaagatagaaagttttcccgcgttagtaacatgctgtacagcattgctaaaaccgttcataacttgatgctgagcaatgctacagcattccaaagaattggtagctccccagagactcagattaaaatcaggaagctttgcaagctcaaatcctcagagagtatacatacacacacatacgcacaaacacacgcataccatatcaaagccataactggataacttttatatgctgatggggaagatcctttatctcttcccttgaatgtttttctccatgggtgcttacagctatgcatttaaagggtttgggcctgctatgtactaacaaatgtgattggttgcccaatgtgaatttaagtaatcagcctttcattcagctggagtcttggtatcaggtggaggacttggcagagttatgtatctttgccattggactggcagccaagcaagaatgatggagacagtgacttaaaagaattcagagttgaatcaagtacttgtgaaatcaggctgcccaggtcaggcaagttaacagaagcagccaagaagatatgttggtgcacgtttctggtacctgacctaatcaggctagcggagtagccctaaacattccacccaagactccaggcttggagccatcagaagatggtagtaaaattctaccaggtaaataaaagtaaagaaataatactagagatacgcttgagttcaatggcttttagggcattaataacaggtattacatccattgtatctcttttattataatttcaagtgtattttagattcaggaatacatgtgcaggtttgttacatggatatattgtttgatgctgagatttgggatatgaatgaccccatcacccaggcagtgagcatagtatccaacagtttctgttttattatgagttttgtttttatcaatatgaaacttttcttcaataagcaagcctctgatgtcaaatacagcatactgcaatgtcgtacaaagctattttctattttatagtgaaagatgatgacagcaaaagacagtctggtctgcctacatttatgttttccacttccaacatgctgttgttgctctcgataagatcaccaatgacctcctaaattgcccgagctgacttttccctcctggtcctggctgcatctgacttgttgacaactccctccctccttctggttctcttcctgggtctgatgactattattctttagggatactcatctccttcctctgcccatgctttccacataggttcatctttatgctacctttcttctcactcttttcaccctaaacacctttcctgagcaatctgaccatccctagtcttattcaacatcacacacattccaatgactatcaattctctatgtgaaattgctaaaagacagttttaacctgcattcctccagataagtaaattctcagattgtttctgtgttggcttgttctttcttttgtatggtaatacctgacctgtcagataagtactttttccacagagttaaattgaggtgcgaaacaaaagaaataatgaaagctttccatcacaaggtgtacatagactggaagagaatgccttgaaattttattttaaaaacaccttctttctctgaaattcactcacatcacccataaccattgtatcttatcctgttgctgagctgataaataagacacgagaacacagttgctttttataaggttcccattgtaagcattgacttttaccttttacaactgacattatctgtagtctcacctgcctcttcagcttagttcttgctcaaggcaagtcctcgtggaccacaaacgtgaaatcttagaataaggcagaaaatcctctaagttttattgttaacttctttcctgtttccctctctgattgtgaagttttcttcagagcccgtcatctggaaagctgtacgatcagcagcagtcactccctatctaacacagtctccaacttacaaatgattaaaatgcttcccaattttgactgaaaataggcaagaatattccctttgttttgggaggctgaggcgggtggatcacgaggtcaggagatcgagaccatcctggctaacacggtgaaaccccgtctctactaaagatacaaaaaattagccaggcgtggtggtgggcgcctatagtcccagctactcgggaggaggctgaggcaagagaatggtgtaagtaaacccgggaggcggagcttgcagtgagcctagatcagaccactgcactccagcctgggtgacagagctagactccatctcaaaaaaaaaaaaaaaagaatattccctttgttgatatttgttaaaatttatatttatctagtcaggaaacataagatctctggatgagagaatacatcattaattactcaaaagcatctcagggcaagatgtttatctgtgagtgcaggggttgtagtacaggagagaaatcccagaattgtggatcttggagattatatagagcacctgatgtatcaggaggagagaaagtgagagagacagacatacaggaagacagagactttgctctgggctataaaccaatgatctaggtctattatttttggaatataagttgaaatgtaatcaaagggctcttggagataaaagtttttaaatctctccagagcaatgcactaaactccaaggtacgcttgccattcagtcaccctttaagacagttactacaactctttgctcagaaagcctagtccatgtatccaaatgtgaaaatatgtatggctcagcaatccctgccatcttactcctcttctcaaaatctgatttcaactgcctctggaacatctacagtttgatgcctcaaaggcttttcagaatgaccatgtccaaaattgaactgatcacttatgcacacatacacaagcatgtaaccatggaacctcttcatctgtctgaaatcctgttacccaatgacaccacaaatcatgtggatgcccaggccagatacctaagactcattcaagttcttcctcttcttcacccaacacacagtcactgaattctgctgagctgttttcctaaacttccttcccacttcagctcaaatgtgaatagcaactagatacttgattcaattaatgaacttttgttaagactgtaggtgtgttaatggtattatatatgtactttccgaaaaaagttctcatgagagaatatttcagcaagagaaaaatgctgaagtatttatggagaaaataatatatcagtttgtttcagaataatctagttgaagaggtgagtgggtggattgtccatggagtcataacagttggcactggattatagggttatgggagctatttgtattattttcctactttcaaatatatttgaaatcttacataatgataactttttaaaaatcatagttccccattagctactgaagtacaggcagaattttctgttgagattcaaagcacattattgaacatcctcagcctctgtttcatgccccatcttcccctaagcttctatgttactgaaaaggcagccaaatatgactgcgcttgttacctagctttgcgtgtgtgttacctactagctctaatgttcttcccacttctactactcagatatgtctactgcaatttgcaccttcttcgtgaattctttcctgagcctatgaccaaatatatgatacatgttttctctaacttctagaaaatgtttggtaccacttggaacactcatttcttccttcttctcatccagctaaggcttctatacttggatttttttcttcaattcttcaaaccatatcctttcttactactacaataaaacctacttaaaacttcttaaaggcaaactaaactgtgtttcacccacctttgtttctgctatattgctccttacacatgggaagaactcaataaattttgctcagtggaccttatgtataatttagatgatcaaaataacaaaattcgtactaggaagaatagccagaatgtagtttttagcaaatttattgagaataaatatgtttagatttttctttcttcccgtataacccatttgtggtttgtgatttttccgttaaatagaatataaacaaaacattatggattaaatttatgggaccatctattcatttattcaacaaaaaagcttttgccatctatcatgtgccaagcacaggtttgagctttggaagcccaacagataacaacatccctgtagtcatagatttcaaattagtggtatataccggctacttgatatatattttaatgttagtaataagtactataaagaaaagggaagagtaatgccaggaataaagagtgattgctggtgctatttaaaatagagtagtagagaaggcccctttaacgtgagaaagaagtaagggaaccactgatagaaatgtgggttaggaaaactatttttggcaggtagaacagcaagggcagaaatcttgaagcaagaatgtagttgttatactcaagtaatgcaataaacctaatgagggtgaagtgttgtggactatgaagagactgggaagagatgagcttggaatggtaggtagtatacaaccaagtcatgtagagatttataggtcatagtgaagattatgcttttttaaaaaaagtaaaagcaagtttattaagaaagtaaaggaataaagaatggccactccgtaggcagtgcagtggcatgggctgcttgactcaggatacttgtagttatttcttgattatatgctaaacaaggggtggattattcatgagttttctgggaaaaggagtcagcaattcctagaactgagggtttctcccattttagaccatattgggtaacttcttgacattgccatgcatttgtaacctgtcatggcactgctaggagtgtcttttagcctgctaatgcattataattagtgtataatgagcagtgagaaggaccagaggtcacttttttcaccagcttggttttggtgggttttgactagcttatttacagcaacctgctttatcagcaaggtctttgtgacccgtatcttgttctggcctcttatctcatcctgtgactaagaatgcccaacctcctgggaatgcagcccagtaggtctcagccttattttacccagcccctattcaagatggagttgttctagttcgaacgcctctgacatatttcccctctttcttttacaagggaacccttaatcctaagggtagtagagttacccttaggattaagtagtagaagggtaatacatcttctgtaacttcttcaggctgaatatgggtgatgatatttctgcctaactattagggtctcttgtattcagggtagagaggagctcagtcagcaagcatcagcttggtgagggccattcataactgataaatggtgatatctggaagattagtaagttttcaatctaagaaaacattgagtaagcttattctgcattcctatacaaaaagtaaaacagcaaatatattccacaacagtaaaacacaataagtaaaattatcccaagtaaactaaattagaaggctttccgtgaactgggcagctgttggaaccaaagtgatgtggggctgctagctgattccaatacatgcccagaattagaatactgatccaggtttttatattacccatccttcttgtttcttctgaggtgcagtcagagatcactggcaggttcacaggaataagcaggatcagtctatattgcaggaaaaaactcaaaaacagctgacgagactaataacaggtgtaccatagttcttaaaacataatttttttctctctccagtctcccatttttactaaagatggatcatcataggactgatttgctttattatacttggcctgattatttgtataaagtgttgcaagaataattatttttcatgtaggcttttgaaattggctgtgattgaactctgtgatgaagagccaccagaagattttgagcagaggagtgatatgatcccaattatgttttaaaagaatcttttcggctcttgtgtggagaattatccagtaggggggaaagagcggaagcaagaggaccatttagataggtagttctataacccagatgagagacaataatagcttctatcagatctgtagcaagaaaggtagtgagaagcagtcaaattctgcatatgtcctgaaagtcaagccaaaacatttgcccaataatttgaatactggagactgaaaaaattaaggatggctccaaagttgtcaatctgagtaattgttaattgaattactataattcaattgaaatcagtaattgccatttactgaaatgagggaatctatgggatgagaaggattaggaaatgcagttcagaattttgtttgcgtcatattaagtttgaaagtctcgtgagacctccaagtgttgagaaattagcatttgttagactggagttcggaggagatgtccgggcttgagatacacatttgggtgtcattgtcttatataagatatttaaaattatgagaacaaatgggatggattatggacagagaagaaaagaagtgcaaatactgagtcagagcactctaatattaagatcaggatgagaaggatccagcaaaggaaagcagaagaggtcaggatacagaagccaaatgaaggcagttttaagatgtagggagcgatccactctctcaggatgaggtctgtgatttacctattgaatttgaacatgtcaaagtcactggacttcatggttattaactttaaaaagtcaataattaagaattgcaacaccatttgctacctttgggatttgtatatatatatatatttttctctttctatagacagctaattcatttttttactgttttaaaatttttatattacagaatataaaagatagtctacaacaaagctcaggtcggattgacattattcatagcaagaagacagcagcattgcaaagtgcaacgcctgtggaaagggtgaagctacaggaagctctctcccagcttgatttccaatgggaaaaagttaacaaaatgtacaaggaccgacaagggtaggtaacacatatatttttcttgatacttgcagaaatgatttgttttcagggaactgtagaatttatttcagtaccctccatggaaaaaagacagggaaaaagaagtatcactctcattgaaaaatggtaagtaaaatgagaacaaataatgatgaacaattcagacaaatgagctgaactgtagaaattattcagtattaaatttagcgttatgttgaagcattatatcttctaaaatttcaggtaatcgtaaatcagattggggcattgaggtgctataaacagttgttcgatataacatatttatctttagtcaaatctgtatctacaaatttataggagtttgatacttagattaacatgtttaaaatactacctatcaataaaaaaattgattttcatttatttatattttggagggtgacactttacactttgcattaccctcccccacatttttttttgccatggggaatttgttaagttgatttaaaatcatgtttctttttatcttaattgaaatatttagctgttgacttaattggggggtggcagaaattcaattacattatttagcttcacatcacaagaagtggattactctttcttttacatttttagattaaaagtaataaagttctctaacagcttaaagtgattcatttcagaagtctttatcctcaaggtaggcttcttaattattctcagaggaaatcaaatcattcgtctaataattatagggaacctccatggtatctcttacatctgtccatttctaaccatctttactcctattttagttcttggtttactacatcaggcacctaaagagagatttctagcattaatctcagttgtctcaagtgattatctccactttgttctcaacgatctttcagtggccgtcatttttctaaagtgtaagagctttggtactataatctcattcccttgagaatgaaaccctgactccttaattgtgcaaaattatctggtcagcctcactgcttatttcttcgtgcctgccctatagcaagcccctccaattatgttctagcgatattaaatcaatttgcagatgcccaagtgttttgtactccctctgacctgcctgttcttcaggtctcacttcagatgttgtctttttctagaaatcctaaaactattagtcgctcctaacatctggaaacttggatattgtttcatcatttaatgtaatttaatatcaataaatcatttatgcatttgtaaattttccagacttggtggctaccgtgtagaatatatgatctgatgtgcctgctcctaaaacctaacacatagtaatcaatttgtttacttttctgcctcccacacaagctccttatagaaaagggctatgttttatttgtgttatatgctcaggactgatatagtgctgagcacaaagtgggtgttcaatgtgtctggactcaagcctcctctccgaaacctgagaatatttcccctttggatagtctaccagatttatctcactgcaccttccagggcaggtgcggtggctcatgtctgtaatcccagcactttgggagtccaaggcgggcacatcatttgaggtcaggagtccgagaccagcctggccaacatggtgaaaccttgtctccattaaaaatacaaaaatgacctgtgcgtggtggcatgcgcttgtagtcccagctactcgggaggctgaggcaggagaatcccttgaacccaggaggcagaggctgcagtgagcccaaatccaccactgcattccagcctgggtgacagagcaaggctccgtctcaaacaaaacaaaacaaaacaaaaaaacagatttatctcaacttccttgaaaatagctggtcccacagtatccaaagccaggcttgataaaggcaaagaaactcagccactctgtgtatatgctacaaatacaaacttaaacttataaaatggtggctcatgcctgtaatccctgtgctttgggaggctgaggcaggagggtcacttgagcccaggaattcaaggctgccacgagccatgattgtgccactgtactacagcctgagtaacagactctctctaaaataaattaacaaaaatatttgaataaacttatatcgccaccatggtgtactttctcccagcatttcacattgagacattatgaggctctgcgggctactccaatgatgtcagtttcattaccatcttttgggatgttcattccactcttgggaagttcttccccctctggtttgtcttcttatagtcagtgttttctccaagcattctaggccacccacaccatcccctaaggaccgttgaggtttcttggatagccagtgattactgtgcttctatatacacctaccagttttgcactaaagtagaaataacgctttctgctttttgaggtttctcctccgctttactcatgagtaatttttggcaaatgatccaggtattcccttctcactgggtcatatggacatttccctttcagtttaccttcaccttagacttaaacagaaacactaacgccattccacagagagggtcgctgaaatctcaccccaactctgaggacttttctggttttgacaaaggatagagtttctctagccccaatagatccaccctgtccttatccagaggttgaaattgtacttccattgacattctataggaattggtcaggagctgttaaatttcctatgacttttagtacaatctcagatacaaactgttttaagtaattgcttataagcacaggctctagagttccaacccgttttggaattctggcctttctgctatctatgtgcccttgagcaagtctcttaaatcttctgctccatacatttctgatgtataaaataggataagaatagtgtctatgtcacagggttgttatgaggattatctgacacaatatatgtggggagcttagtgggttgcttaaacacgataatggctcagttaaggttggcaattttgatgatgaaaatggtgatcttatggttctgatagtcatgatatctgttaattcattcttacatgctttcaaatttccctgagaactacagagagaagaattagactcagtccctgctttgaagagcttcacagtcttggagagaaaaggcacaaccagccagtaaaataagggttgatagactggagctgtacaagagggcaagaacaagatccctggggaatggaatgaagctatcttactaagaatggggaataagtcaaggtctatagaccattcaaggttctgagttacaactaacagaaagtgactctagttactttaggtagaattatataaattactagaaggatatcagatacctcatggaatcaataggaaagcctgagagctaggtttaacaatgggcagaaactataaaggaagagcaggctaggcatccagaatatatctactatcaagctatgaggtaaatctgaattattttgctgtcatgccagagtccattgctttaccaggagcaccattgcactggacattgcttgctatcgtcactgcaaaaaaaaagtatctaaattatttattcttgctgtgtgtcgctcattctacaactagggtctctggcagaagcatctgatagtcagaggatggatatttttttctgtaaaggggcagttagtcgatatttttgtccctgcaggtcatgtagtctctgtcacaactactcaactctgctgttttagggtgaaaaaaaccatgtataatatataaatggatggacatgttgtgtttaaataaaactttatttaccaaggcagatggcaggctggaattgctgatgggccatagattgatgactgctgttacaatacaggtttaggccacagaactaggttcttattgccagagatcagggaaaataaatagctgaatttgttcttcattgtagtggcagtcaacacctcgtgtcctactaagtcccatacaatggtagattcttgaatccttggagagatttagaagctatgcattcctgaatacacaaatgttcagtacagccttcatgtggtgttctcaacaaaaatctgctgagttttttagtaagccaatttgggttaaatcaaaataaatttgagctagtaagaagggctatattggtatttttcttaaatggtacatgtatggtagtattagctatgaccgcaataatgctgtgacacaaatcaccctagaacttgctgactgaaaacaacaggcatttctggctgtttaggttacttgtaccttgactgactcagctgggcttggccgggaagctctgcttcaagatgtgggttagtagagctaggttccatgatgcatgttggattaaggtctgctatatatgtctttgctctggacctaagatgaagggtcagtgacatgttttcatgaccagtcaccaaagtataaacctaaacctcccaagaacactcatggcctctgctcctgtgaagttcactgacatttgattggccaaagcaaattacgttgccaaatctgacatcaatagaatgagaaagtagactcttcctacagtggaaggggggagagatgttaatatttgctgaaccataattcaaattattagagatagttaataatttataacaggattgttttacagctagaaaatgccttagtggttttgccctgcttcattattttataagggagaaaactatatttcaaagatgttatgtgacttgcctaagcacatactaaatagtacatctgcgtatttctcgttcagtcatctctattaaatgtcataaggtaaaacagacattacgctttagatgagaacaggaagatatttaaaaagccagactaatttatgactgctcattcattatctaacatacctgcttccatacattgtctttcagcaaatagaatttcaacatgtatctcaacaagttacacatcatcaaagtattaaaagccttattttcacggacattctgattgttcactaacagtcaacacagtcaacagtaaatccacaagcaccatgaacgtatggatagatatgcctatatgtaagattactagttaactttttgggaaattaatattactgctaaattcagttttcattgattttcgggtgggtaactaactgcttataaaatatacctataggaaacatgtaaaaacaaagaatttacataagatctatctgggattagagaaacaaagctcttttcttctttcaatgaacacttaagaagggcctactaaatgtcagatgttatactctattgtcgttagtttctttctgataccatctttactatcctgtaagccattagtgagtgtttcccacttttagaaaatgacttcccaaagactaagagggtagaacagttcaaatgctatcatcaaaatgaaggcagtttctagactacaaattgctgtacagccataagatggcattattgtgtaacaacaaggtccctgtcaaacatcaagaaagtaatgttttaaaatcagtatttccttcttggaattctacttagtcagatatgttgggttgacttacccacccatataagtagttaaattcaagatggttctgagctttagatatgatgtaaaatagacatgagactaagagtatttatttctatattattacatttctatagcaaaaaaagaaacctctaaaaaaattagagaaagaagtataagggcatttaattaatcaaatgttcttattaataatatttcataaaataaaggaaatgttgaaaaataaaatatgaacacagtgttgtataaagtaagtcagaaataagagaacacttactgtatgaatctattatatgaaactaaaaaattaggcactttggagtttagaggtcagataggagttacctttgtgagttgtgattaacaagggctgaagcaggcttctagggactgggtaatgttttgtttcttgatgtggatgctgcttgcattgatgtgtttcctttagggaagtttatggaaccatacacttgtgatgtgtacacatttctgtgtgaatgctggactgaactaaaatttatacttacattttaaaaataataaatatgtactttaagtacaggagggacataaatcataattgttttaataaagaaggtgtagctttaggaaaagcataccgcattgttctatttttggcatttcaccatggacccctgaacattttataattgcccagtacagcctgtcagataaatatgtgggcactactgctttagagaaagtattttccaaatttatcaccaccattctggaaccacagttccacaggtcattaggatgctgagggtgggacagttggaagctgcttccccagggatttctccattgttcagttctcatagcagtaagcctgcagcattaaagcactcacaggctctggctgccatttgtgctacatgaagaaaaatgagaaaatgaaagaaacgaaaggagagaaaacaggagtagaaaccaaataaatcagattcgaagagaaagtccctaatcgtctctgtattcagacagtagggaatgagcatgcaattctgcaagcccattcctaatgtgagtttctgataagaatttgctatctcagttgtaatctttctactgagacattcaataaataattttctttcatgtcaaggtaaggaaataacctcacattacccatataaggaaagaatagtatactaatcctcacgttatcactatagaattttatcttttaaagtggaagctagagggacagatgcataatctgggagcttttccagaattgtttgttcctaaatgagacattcagctatagcagcattagcagcctcttctatttgtcacaatgccatatgtagttgggaagatacatgataagcacatacaggatgctgacaactcacgaaggattatcattgcagtcttagaattaatctctaccatatttgaagatttttatgcaagactggatcttcattccacaacccaggtataggtatatgtgccaatacaaaatacttactgttggtttctgagcttggtagaattaggaagtaaggggtaaaaaacaagcaagtcctgaacttaagaaagttgttcatatcctattccatggccactgttttactgactggaagaaaggaatcccgtggattcagtcatggggacaatgcagaagaagatacagtagacagacagagaagtacaaatttctatttatgttccacttttcaaaattttttatctttaaatgttatttttaacgtttgtgggtacatagtgtgtatatatatatatatatatatactgtatatatatatatatatactgtatatataaacacacatatataaatatatactatatataaacatatactatatataaatagatttactatgtatatacacacatacatagtgtatatatgtggggtatatatatatgtggggtacatatatatatgtggggtacatatatatatatgtggggtacatatatatatgggttacacatatatatgtgtatatatgtggggtacatatatatatatggggtacatgagatgttttgatataggcatgcaagtatcatggaaaatgggatgttcatcccctcaagcaattattctttgttttacaaacagtaaaattgtatttttttaattgtttaaaaatgtacaattaaattgttttgactatagtcaccctgttgtgctagcaaatagtaggtggtgttcattctttctaactattttttgtaccaagtaaccatttcaacctccccctcaacccccccactacccttcacagcctctggtaaccatccttccaccctctatctccaagtgttcagttgttttgatttttacctgccacaaataaatgagaacgtgtgatgtttgtctttctgtgcctggcttatttcatttaacacaatgacctccagttccatccatgatgttgcaaatgaaaggatctcattctttttatggctgaatagtactctattacgtatatgtatcacattttctttgtccattcatctcttgatggacgctcaggttgcttccaaatcttggctattatgaacagtgcttcaacaaacgtgggagtacagatatctctttgatatactgatttgctttctttgggatatatacccagcagtgggattgctggatcatatggtagccctgtttttagtttctgaggaacctccaaactattctccattttggttgtactaatttacattcctgccaacagtgtacaggagtccccttttcttcacactctctccagcatttgtaattgcctgtcttttggatatgtcgttttaattggggtgagagaatatcccattgtagttttgctttgtatttctgtgatgattagtgatgctgagcatattttgatacacctgtttgccatttgtatgtcttcttttgagaaatgcctattcgaatcttttgtctattttctgatctaattattagactttttcctatagagttgttttaactccttatatattctggttattaatcccttgtgagatgggtaatttgcaaatattttctccctttctgttggttgtctcttcactttattgattgtttcactgcggaggagctttttaacttgatgtgatccatttgtctatttttgcttttgttgcctgtgcttataggatattactcaagatttgttttacccagacagatatcctggagagtttctccaatgtttccttgtagtagtttcttagtttgaggtcttagattttagtcgttaatccattttgatttgcagttctctgatggccagtgatggtgagcattttttcatgtgttttttggctgcataaatgtcttcttttgagaagtgtctgttcatgtccttcacccactttttgatggggttgtttgtttttttcttgtacgtttgtttgagttcattgtagattctggatattagccctttgtcagatgagtaggttgcgaaaattttctcccattttgtaggttgcctgttcactctgcatcaattttgcatcaatattttttgcatcaattttgcatcaatatttatcacatggtagagttcagcagtgcagccatcgggtcccaagcttttctttactgggagagtttactaaggcttcagttgtgttactcgttactggtccgttcaggttttggatttctttatggtttaatcttggtaggttgtatgtgtctaggaatttatccattacctctagatttttcaatttgttggcatatagttgctcatagtagccactaatgagcctttgaatttatctggtattaattgtaatatctcctttctcatttctgattttacttatttgggtcttctcccttttttcttcattagtctggctcaagatttgtcaattttgtttaccttttcaataaaccaacttttcgttttgttgactttttgtatgttttctttattacaaagtcatttatttctgctctgatctttattatttctttcttccactaattttgggttcgatttgctcctgcttgtctaggtctttaagttgcattgttaggtgatttatttgaagtttttttcttttttgatagaagcacctacagctgtaaatttctctcttagtactagttttgctgtatcccataggttttggtatgtggtttttctttcattttttgaagacatttttcaatttccttcttaatttcttcatagacccagtggtcatttagtagcatattgtttaacttccatgtgtttgtatagcttccaaaattcctcattgttgatttctagtctcattccattgtggtcagagaagatgcttgatattatttcattgttactgaatttttaagactgcttttgtgacctactgtgtggtctatctttgataataatctgtgtgctgagaagaagaatgtgtattctacactcattgaattaaatgtcctgtaaatattagatccatttattctatagtgcagattaagtccaatgttactactttggttgagcttctgtctgggagatctgcccaatgttgaaagtggggttgttgaaggctcctgctgttattgtattgaggtctttctctctcctgagctcgaataatatttgctttatatatctgtactccagtgttgtatatatatttgctttatatatatatactccagtgttgagtgcatatataattgttatatcctgttgctgaattgacccttttgtcattatataatgaccttctttgtctcttcttacagtttttgtcctgatatcgatttggtctgatataagtagagctagtccagctatgtttgggtttccattggcatggaatatctttttccatccctttatttccagtctgtgtgtagctttataggtgaagagtgcttcttgaggtcaacacaaaattgggtcttattttttcatccattcagacactgtatctatttttcttttcttttcttctctctcttttttttctatctttctttcttttcttttctttcttgagacagcatctcactctgttgcccaggctggagtgctgtgacaggatctcagttcgctgcaacctccgcctcctgggttcaagagattcttgtgccttagccccccaagaggctgagattacagtcacccacaatcacgcgtggctaatttttgtatttttagtagagttggggtttcatgatgttggccaggctggtctcgaactcctgacctcaagtgatccacctacttcggcctcccaaagtgctaggattacaggcgtgagccaccatgcctggtcgagacactgtatctctcttgattggagagtgttgtccaggagctgagcctagaaatgggtcctcacaacactgtccagtgccctatcctactgtgactaagctggtatccaagatgcaagacagaatcctctttacttttcactctcctctccttaagcaaaagtaaggagtcacttttgttactgtgggctgcactgcttgaggtgggggaggaatggtgcaagcactcccttagccatgccagctggtgtctccctaggtcacatgccaccctagtcctctagctcttagcccaggctatgactagaagttatctaggaattgcagttcgtgtgtcccagactgcctctcaggtttacctgggactccagagcactttggcccacaatggtgaggcttgccaagaaacttgagttctgactgctgggatgggcgattcccttctggctggggctagttcaaatattccctccgtgcacaggcactgactgaggccagcatggcttttttctctactgtgacagcacagcagttagttcaatgtaaagtcccccagtagctgtactgtcccttccaaaagtgcaaagattccctctctgcactgcacgtccagtgctgggtgattgggaaggtgtggtgttggtgattcaagactgtgtctcctgcctttcctcaatgcctcttttagcaagatgaagttaaaaccaggtaccatgattccgtacctggtttttggttctggtgacagtgcttttctgtctgctcatagttgttacaatttgatgtttcagtgagggagattagttatataggcttctattctgacatcttgcaccactccgtctcacttttttgaattgttgaaaccatggtttatggggaaatgttctgttctggtttttaccctcaagatcttctttgaaaatcatgatttactaagtaactagttggatagaattcatttttaagaaaataatgaataagtagttcccttagatatagcaagcaatgttcttataaactgacacaccaaaacacttaccagttcacctaaacactgaaagtatttaaaaatttatttttaacctttaagtttttctccatttgagtatcttgtgcactatacgctctcctacatatgtctacaatctttggtctgatttattttattggttgttgaatgtcagaaaccacctgaattttgcttgtatatataatgcccagtagagtgcacattggtaatcaatacgacttgatgataataatggtaatgaacactataatttgatagcatcaacttggcatgtatgccagaaataaaccatcataaacttcgagaaaaacaagtctcattaatctgtcatttattataatctccctccatcaagcgtagcctctatatactgtcttttttgccatatgtaagtttcttcttgtatatttcagattagagcttgcctcctcccacacactatcttctatttcacactgctctgttcaagtgtttatgtttctgctgaaggctgtataatctaagataatccctagctattgtaaatatcattcactggccagtcattgcattttgcacaccactgagagagtgattgtgagccaaatagaggagattttgtttccacccagcaacccaaaatgaattgtgtgatttgactattgatgccaattacatggaagttttactaccagaggcaaagctttaaactgcaaaagattaaccccatatagttggtgtcatgaggtatttaatgtatattggactatcaaagcgtctccttacaacaaaccaattatcaatgaataatattcttatcttattgtgacttattgaaactctttaaaaaacatgaaccattcagcacactataccgtctaaattagatatctaaactagccttcatttacatttccttgtttagttttaaatataatttcttctgaattcttagttgttaagagcaggtggtgaaagaatttaaagaagaaaatttgttgtatttattaagtgaaagagctttttgaaatgcattaaatagaagtttgtttctgcccatcagcttatcttctgcatattcctatttatagttcaaagcacttaagagttgcagagtgatttgctttttatgatcaccgcttcatccaggatcatttgccttatatcttcaacattttcagattcttataaatcttcacagttcacttagaggttagtttaaaactttcttcagataagaaattgactagatataaaattcacataatctcagagttagccatagatcaatatccccagtctttttctcaaagtaattgaacatttttgtttcccaggatagttgtatacaagcattttcatcctcaccatagatgattcttgttcttcagtatatgaggggactgtatttgcctgcttgttatctaaataaacatttttattattgtcaaaggaaaaagactctaatacagaaagaaattttgtgtccataggactagcctcattttggaggctgatattaatatttgactttattcattgtgtatttcttggttttgtcatttcacaaatttcccttctctaaatatgcattttttctctacctggaatagatgagttttaaaagacattactgtaaaataaaactgtgctaaatgtacttttcccagaaactctctttattttatcaattataatttgctttggctaagtgttacagaagctcaaggtagaaatgacttaaataaaagagaagcctatttctttctcctgaaaaaccctggaagtttgcagccaaggcagatatgttggccccgctcatttctgttttctactgagtgagttatctttacttggtggaatttcatccacatgttgcaagatggagctctcatgacatccacattccaagaaggatgtaagaaggccagaagaagggtcaaagggtgcataccaattgtcttttagggaagtttcgtgggagctgccatgttatatttccacttacgcttcattggccagatgtctgtcacatggccacatctaagctgcaagtggggctgggaaatgtgtttatttcacatgtgctctgctaaaaactgttcagtcatgaaaaaaaaaaaaagaatattggaagagaactaacagtcttcaacatgtatatttaaaaagagcgttatttttcttttacttatttatttttttttgagtgagagtgttgctggggctggtctcaaactccctggatgaagtaatcctcccacctcagccttctgagaagatgggattacagaggcacaccactgcacccggctcctgttttgttttgttttgttttgttttatttaaggagccctaagaagagtgtaaaaagggcaactttgtctttagttaacccttccctttttttttctttcctaattttatgaactctgattcagcccgcatcttactctggcttactaaattctgccaatataagagtagaagttttcatcatttccctaggtacctactcttctgtttctccatattctcaaagtaatttctcattcatcaacttttgtctgacttagatttaagctactgcttaggaaatgtgagaaatggagaatttggttgtcatagcgctcctacttagagggctaatgctttcctaaattttactaaagttggatcctaagttatataagttacctaaatttaattagcaagttttgcttactaattcactgactaaccactataaaacaaggacctaagtttaaagctgatattatgacaatgtactgaaatttcaagacattactttttctggacacgtaggatggaccttgcataagataaaagagcttatttttaggcacacctatgtgccaggcatgggttcagagccttacatatatcatttcattctcaagagaaccttaattttagagacgaataattttgagttttagaataaataattgtcttaagctcacacatgaagtatgtgccagagtctatatcgtgaccccagttatgaattcttttccactacatagcctgcctccatggcatttcacataggatttcttatgctcaaggattatgttcttccttccagatctatagacatcagtagaaacaacacaaatacgtataatgactttttaaagtctcatatacaagaccaaagtactttaaaaagatgtttaaatttttgaaggtgatatctttatgttcgagatcagtagcagaaatggattgtaattcattacaagatgcttagcaaagccaagtggtaaaggattttctgatgtgcttgaggagtcctgacttgctccttagcaaattcctacacaccattcagcattcagtgcaaataccacctcttggaatccttctctgttcttgatcaattattccattgtctggattcatagaactctctgtttacctatttatcttacaggttattatcatgagtttatatgtcttacatagctgtttgcaacatgttaccattcagtggagtactttttcctacagggaagaggctgtactatataccttttgtcacccctaagtggaatgcagtatggtttcatgttagatgttcaatacatgttaatattttattgatgagcccttaaatgtatataataagcttctcactcaaaagctgtaatattctagaatgaataagtttcttgagaaactctttggttaacagaatctccatttccatcatagtgtattcaataaattattaatgcagggtaaatttccttatatttcctttcatttcgctatactaaggtcaaatcatgacttttaggtgtggatacagcaatatataaaataatctaagacctggatatatgtttttctaattagggaattggagatacatgaacagtctctcatagagaaaaatatatccattagtcactaaagtcagtataacattctggtgaaaggtttgcttgcttgcttgtctgcttacttgcttgtttcaccttctattctaggaggatgtttgtcacaattatgaaattctaacgctttaaaaatctgtttaccctatgaaagttgcaaattcttgcctgtaaggcaattttcacaagaattattttcatattagttttagtttatccgtggatagtctcaaattcctcttgaaaatatcagtgttctcaagggaaaactgcccattacaagccacagatgtggttttttgagagatttctgcctgaaatacaagttttaaaatattctttgtagtttcctagtatggctagatacttgtaggaaatgacaatttagatgcacatttgaaaattcttagcctttgagtaatttatatgtttgaataaatttaaactatctttgttcataaaaaggcaaattttgtctgtttgtcttgaaatgcttttttagtttcttcttcagttctttcacttgtctttctgtaatattcaaaattatagcatagtacttgaaaaccaaggatggtccagtctgtgtcctttgttttgaaggaattttggaatcatcagagatataattctggaatttctttgggtaccttccataaaatagtagcatcctgataaggacgtagatgctaacttttatttttatctcattttctttcccctatctctcagtaatgtaggagtgacccaaggtagctgtttattgggccctcaccaaagtcaatcaatattagtcagctacaaccacaataatgctgtgtgacaagcataccccaaaagaacaataagcacttatcctcatattcacaggcctactttgagtaatctctgattcagaatctgactgtaggttgaccaaacatgtctgatctatgtgtctcattctggggctcaagctggaatggcagtagatatttggggcacattcctccatggctgagttctaaagatctcagaagggtaagcagaaacacatgatggttcttaagacccagatttataactagcgttctctcttccatccatagtcaattgtcaaagcaagtcacgtggcatatccaaagatcagggatagagaaatacacttggcagttagtgaacccatttcaagagtgtgggtgtataacactactacaaaacagaactgagacttgcaacttgaaataccacaccattctagtagaattttattacagtattaattaaacatttttgataaaacacagacaactctgttagaaagcccaacttacaatttgttgatcccacttggaaaggtattctgaatccattttttcacaagttttctttctaattcaatgtgttggggtacttttattttacccagaaaagtaatattataaagcataaagttaatgccccctgtaaaaatagaatactgaaacaaactttaagtcacaattttattatttactgacttgagaatctccttgtgcttcagcacacttggtagttggatttccaaatagcatcatgactttccatacccagctgtctgctgctcaaaactaccataagctgactatcacagctcacaggatacccttgaagaagaccatctggtttatgtctcttggcaaaatttgtttaaaaacaagcagctgcatgacaaagtaagaaagagtctctgtctagctgtggtaaataagtagctttgcaatactcataataaagcatttttctaatccaagccaacatcttcaaaaggaaagcattattttcttacaactgaaagaaaaatctacagaattcagtgatgagggaaggactccattaaatttgtttcagcagcttgagatagtgagaaaaacaaaacaaaataaaaacctgtttgtgattagatacagtcttgtaataactagttttaaaagtatttatttagaatctaatacttggatattattttaattctttatattaagagatttacatttcataaaagcttgtcctttgaaccctaatactcatattgtgatggtgagccggaatgagtaaggtcacttactatatagtcggtatataataattcgttgaataactctctctcctcctgttactggcagtgaatccatacgggtcttcagcaaccttaattcatgcctcctcagaagaaagaattcgaccaaggaggcataaggcagaagaagagactgaggcaagtgttagagcaggaatgaaagtttatttaaaaactttagagcagaaatgaaaggaaataaagtacatctggaagggggccaagtgggcgacttgagatattaagtgtcctgtttgaactttgatttatggttttgtattttggcatacttccatggtcttatataccttctccccaattcttcccttggggtagggggctatctgcatgcacagtggtctgctgacacttgggaggggagcatgcacggtgtatttactggagttgtattcaagaggtgttcccttaccagtcaagtgtttccagaggaaggtcgtataccagttacactatgacattttgcctcttagtgcgcacgcgggagcccatttgcccaactcctgcgatcttatcgggaagctgctgatcaccaatttcaggtgtttttatctattgggagactgcctttccctggtattggctgtgaccaattattattttaaagacacagtttaataaccacctgactgaccatcacttgatggttgcctgacattcctggttggggtggcgggggtggggggtctcctaccctgctcatatctgactagctatctactgtaacactactattaggtatgtctgtatcccattacactcactctctattacaaaaaagagtaccttattcatttttcaaaagaatgagtgaattttctgctccagttaagtgcttttccttacctctatgtagagtgtcaaactagccatgcttaaggattgattctggtattaataatataaattcttgcattatgagtgtctcagtttgggttcttacataagcaaatcctgagacaaggatgtgagttcaaatagtttctttgggcagtgattctaggaagctgtggtaggatgttggagttgtgagaaagttaagagaaagcaacctgtaaagagtatgttatcaagccaaacaccactgtgagaactagggcttaattccctggagaaagtctgggaaggcataaaacacttgtctcagagttatcttagacaaggtgcaggagctgaggtgtttatatttcaactcttgttagtcacttttaaagggccgctcagggtgtcagggtattaatttcctcttgcaactacttccaacctgtttttgcatgtggttgtagctactttttctgcgtcaaagatagactttaggctaagacatgcagtttccggctgtaggacatcaaccagagtaccctggagtgtccaggcccaagataatgggtgagctccacctggatctgtggcaatgtgagggaggggcattattaccctagcaagggccactgcacttccctatccagctggtcactcttctgcgtatttgtgttacttttctgactcctgcattcctctggatcctgattcaccatcagcttttgtattctgaggcttgtgtggctgtgtctttctatttcttccttattgacttacttgtttaatcttttgctaatgtatacctttgatattcctatgtactcacctttggttagctctgtgaattattgagtcttgctttacagctttaaaaagatcatagccatggtttgttttttaagtgtgattcataacagttagtgacaaaattagaagtggaaattaaaggtcacgtgcacaatcctacacaagccaatttcttgaacgacataaaatacttgaatttgtcttttactatcaccaatatagaaataatttgggggtatttctcaaagtattgatttaacaaaactttatttttgtgtgaagattttttcaagtctcctggaaattattcaaattattgtctttaaagtcaaaggaaaggttaatattagggttacttttctttggtcacagaattgctggaggcttctatgacttgctttgaagcagctgactttatgcacagttttggttagaaattcactaccaattccaacattttcaaagtcctaaaagaccaaaagtacaattcttgaaatatccctagagaaagcaagaataaattagttttcactagaaatgaagacaaatttttctcattagttcattttgcctcatgatcagaattctttgccacatgaaaatattttggttaataggttgtaacataaagagtaatatgaatagagatctagcccaattagatgacagaaaaagagcaaagcttttgaaatgtataaagaagaaagtttaagagagacatgaacaaggctggatgtagtttaaggttgaagaacacagaaaaatgagataagtgaagttaagtgaaaatccttcccttactgagaagaaagagaactcaaaattatgtgaaggtttttgttttactttgttttgcttcttaataaggaaacaacagtggcaaatctggggcattaggaatggtggaacttctataacagtgatgtttcaaaggtcacaaaggaaattaaattgtagattgggtttaaaagcactggaattacttccagccccattttttcaggattttgtatgtagcaggaaatagatcaccgcatagctaaaggggagaatttaggttttaactggtctcagtgcaaactgcttcatagttcctttgcatttggtggtgtatgtaaaacatgaaaggtataaacatttattatcataactttattattatacaactatttattggctgcataggaccatgtgtcttcttgcaggtataatcaaaaataaaaagacagaaatgtatcttatatgaaggctgccattatcgctcttatcaatggccataaaatcagatttcttacatgtacaacatatgaaaatatattaaatatgaaacgttttccattaaataattctgtaaatgattttcataacatttctgtccatgatgtgtaaatctgtagatcaaatactgcaagtgtacagaacttaaaatgctttggtcaaaaaaattctcttattaatatgacaatggcgttcaaaagtaaaaaggtaaaaatacagtttagcattaataagtaaactcagaaagtaaaatatattgatcatacagtctgtattagtctgttctcatgctgctctaaagaactgcccaagactgaataatttataaaggacagaggtttaattgactcacagttccacatggctggggaggcctcagggaaaacttacaaccatgccagaaggggaagcaatcacatccttcttcatatggtggcagaaaggagaagtgctgagcaaagggggaaaagccccttataaaaccattggatctcatgagaactcactatcacaagaacagcaccatggggataaccgcccctgtaattcaattacctccaactgggtccctcacatgacacatggggattacaggaactacaattcagaatgagatttgggtggggacatagccaaaccatatcatttcatccctggcccctcccaaatggcacgtcttcacatttcaaaacacaataatgccttcccaacagtcactcaaagtcttaactcactctagcattaacccaggagtccaagtccaaagtctcatctgagacaaggcaagtcacttctgcctaggagccataaaatcaaaagcaagttagttactttctaggtacaatggaggtaccagcattggttaaatacacccattccagatgggagaaattggcccaaacaaaggggctccaggctccatgcatgtcaaatccaatgaggcagtaattaaatcttaaagctccaagataatctcctttgactctgtgtctcacatccaggtcacgctgatgcaaggtgggctcccacagccttgggtagctccactcctttggcgttgcagggtacagcccccttcctggctgctttcacaggctagcattgagtgtctgtggctgttccatgcacacggtggatcaagccctcttctcacagctctactaggcagtgccccagtggggactctatgtgggggctccaaccccacatttctcttctgcactgacctagtagaggttctctctgagggccccatctctgcagcaaacttctgcctggatatctagacatttccatatatcctctgaaatctaggtagaagttcccaaagctcagttcttgacttctgtgtacccacaggctcaacaccacatggaagctgccaaatcttggggcttgcaccctctgtagccatgggctgagctctatcttggctccttttagccatggctggagtggctgggatgcagggcacctagtccctaggctgcacatagcaggggggctctgggcccggcccaggaaaccattttgccttcctaggcctctggtcctatgatgggaggggctgccatgaaaacttctggcatttcctggagacaattttcccattgccttggtgattaacatttggctcctcgttacatatgcaaatttctgtagtcagattgaatttctcctcagaaaatgagtttttcttttctattgcatcttcaggctgcaaattttctgaacttttatgctctgcttcccttttaaacataatttccaattccaaaccatatctttgtggatacataaaactgaatgcttttaacagcacccaagtcaaatcttgaacactttgctgtttagaaattccttccaccagatgccctaaatcatctctctcatgttcaaaattccacagatctctcggacaggggcaaaaagccaccagtctctttgctaaagcgtagcaaaagtgacctttactacagttaccaagaagtttctcatctccctctgagaccacctcagtctggactttattgtccatatcactatcagcatttgggtcaaagccattcaacaagtctctaggaagttccaaactttcccacatcttcctgtcttctgacccctccaattctctaggaagttccagagtttcccatactttcctgtcttcttctgagtcctcccaactgtttcaacctctgcctgttacccagttccaaagttgcttccacatttttgggtttctttatagcagtatcccactctctgtggtaccaatttactgtattagtctgttctcatgctgctataaagaactacctgagactgggtaatttataaaggaacgaggtttaattgactcactggtttgcatggctggggaggcctcaggaaacttacaatcactgtggaagcagaagcaaacacatcctttgtcacatgatggcaagaaggagaagtgccgagcaaaggaggaaaagccccttatgaaaccatcagctctcatgagagctcactatcataagaacagcagcacgggagtgaccaccccccatgattcagttacctcccactggatccctcccatgacatctggggattatgggaactgcaattcaagacgggatttgggtggggacacagccaaaccctatcactgcctttaagatctatgaattgtttttctacattgaagaaatttgtagacatttgttttttattctctttttggtttgctgagagcagtagtctcttggaagtgagtttcatttacattttttcctttgggtgtcaaatatataaaatattttttaaaatcaatggctgagggataaatgagggttggtagaaagggaaaggataagggttgtagttaacggaccatgttttaatgtgtctataattagatggaagttgtctcttaccattcaacatcctggatggccttcctatagaggacattttcatcttcttttgtcgtccagagctagcatatgtgtttcatgtctttagatagtgaaaatcaattcagattttcatggaaaatgctctctcttcatcctaaagacagaattgtcacggctatttcgtttattgaaaagtgaaacctgctacagttagcatatagttaattccatatatgttacctgtatcatttaatacattcacaaagtaaaaaaccaaattttgccaagttcttgatagtaacaatagtaaaatggaatttctgttggcatattttcatgttattctgaaatgctgaatggatttattaagattgataacaatatgttgtacctttatgttctaaaatttaataacagttattcttccaaacatgccagcgtcctcaatagttgacagtctgcaaaatattctattatgcaatcagccatatctccttcttgagctttctttaagtacttgtatcctgtatttttccctgaaatctagcagtaagttgaagaaatgataaacaaaattgtatcattgtatataatggctatttataaatactgatgtacattttcataatgttatttaaatgattacttcagatatgtatttctgttttctacattttaacttctcaacatattaggttgttatcttagattggattttctaagacatagactctaagacagagatttccatgcagatggtttcttagtgagtgcttttaagaaaaatgcctgggagggagtaaaggcagcaggattgaggagagagaggagttgaatgatgatgcagtgaaatggaagatcttatctggtcccatgtggggttgggatgaccatttagagtattaccgtatgaagcaaggaaggtggaccattgtatccctaatccattagtcattagatgtgagcctcccaactaccagcttccgggcaatatcatcttggtcaaagaagtgcctgtctgctgagagaaatttcttggaagagcttaggtatgatctgttagtagataacaatcccagcaactgggagaatgaatgcttcatttgtaattggtgaatctcggtggcacaccacagtgttcgctacggtaatctttatacttattgagacatatattgtttttaagtaaaacttgtatacctagtaatgcatttaggtagtgtattggccaagctagtcctttttggaaacaatttcattgtggtataaatgatatacaataagctacacatttaaatagtacaatttgataagttttgacatatgcaaataccagtgaaactattagcacagtcaagataataaacatatccaatatcctcacaagtctgttttcggtaatcactctctcctgcccctcccttgattcccaggttaccactgatgctgactggcattatagataagtttgcgttttatagaattttataaaagtagaatcatgaagtatgtaccttatttctggtctgccttctttcactcacaaactactaactttcattttgtgaataatatgatctccgtgtgattacacacattaagaaagtcaataaaaacattgtaatttgattccgatactagtttatgggtctacattatgtatttaaagatactatcatgtttggattagcccttaggtatcaagtaaccctggagttgaggcagttactgttttatttgctatcaatctttttataagctcaccttccactaattacccaaaaatatttgatttaatacctgagtacagaaaaagaacatattcacaatgtttaaattttataatttaatattataatttacaacagtttaaaataactagtcctgaaattgagtatttctcacctaatattctgctctatttattacccactccacgaaaaaatttcccagaaaaatcacaaacatgtctcttgagtgtattattacccaacccacagaagaatttccaaaaacagtcgcaaacattctctcttgagtgcaaccattttctcgggccagccattcattgaaacaaaatagcctgtataacttctgtgggtagacatttgtaggttgttcttttgaggcattagtgctattgcatttaagataaagaaataacgaattcacaaattttataaagttctcttaaatttaccaagtcaatagcaccaccactttgattcctataacctgtgacttagttaggcttctcaattccaagaacataccaccattatttcttataatgtcctcagattaaaacatgtgttgtcctttctttatacctccctgcactttaattgaatattttgccatttactggattctgtacactttttatgttttcatgccctcccttttcattctcctggacatcaatcgcaagtcagtagataccttgtaagagatctctctccacccaaatcactgtttcttttgaaagagttaacctttctgaagcagcactcctgcttcacatttcccagcacaggaaccttcagtgtttctctgttgatagctttgatttcaaacgggtagccccaggagaaaagagagctgaaggatatgttttgcttggctgctttgtttgacctgcaaggaacattaaaaggcaatgaaaccgggcagagactggactgatcaacaccatcagtttagcacttattgctatactttctaaggctttacaattttatgtgtcccacgtgtcccctgaaggcatttgattttctaacctcctaggccagaggctaacatccagaattcatagtctggcacttataaaccctaacttagcttctgtcacttgtatctctatgcaactctacagcaaaatgtacttattttctctaaaatacccttattccatacttctttggagtgtaattttatatataaaagtcctcaccacctgtaaacattaggaagctttgattcgaagaagcagaagccatctccatttaactgaagtgaaatgaaacttactggagggataatgtatagttcttggaaatgaaggaaaagaaggcaactgtggcagagggagggcagcactgagagtcaggaactccagggaagttactttttggatgctgtcattaaaatgcttcagcttcaaattgtactgactctacctttctcaattctagattcaaatttctaaatgtaattggcataaattaggaacttgtcccaccagtttatagagtttacagagcactatgattataggtccccctaagatcatgcagaatgagggaagagtaatttcatccaaggaaaagcagggtaccattcaccaaagagtggagatacttattcagaacaattaatgttagatgccacaaaaaaactaaccctgaaatcaaagtggcctaatgaatgcttatttattgctcatataaagtctgatataaatcaggtagcattccttcacagtgactcagggacctaaattgctttcatcttgtggctctgccatgtcaacattgaaacttcagaggtattgacaaaggagagctgagaaattgacactaactatcaagtacctcaggcaagaagtgatgcatcacttcctacactttcccactttccaggattcaatcacaattgcactcacgaaacctcaagggaacatgagaaacataatgaaatcaataccaagatatccaaagagtactaattttcttcaccacagaagggatattggacagacaaaaaattttgggacagaggaatatccactaaatgatccttccatgccctgctcagatgctacattttccattaaggctctcttgaccaacccataaggagatgatctccaactcctctgaacatctggaacattgcattctacttatttttactgtctcctattgtaataattgttggctattccttattagacaaattataagcttttatgggacggtgatcaaaagtcctaatttatcttgtcttcctacagcattcaaagcattgtagaccttcaatacatagcagtcttcgaagccagagtattagtattttttctaaaactgtattcatcgcaacgaactcgatggatgttcaataaaaatgtattgaatagtcattcatgcagatagcaaatttcttaaaacatttcttactcaatgtttacttatattcatcatgaatataaatttaatataataatatcaaatcccattacatttagtacaaagtaaatataccaataattttatatatgtttaagtgaatttttatatttcatattatttgtgaatgatacacatcgtcgtggaaaatttacaacgttgaagtaaattatacaatatagggtatttgtattaaaatacatttcatagaaggtgctttaaatttaaaaagttagcatgaatacatattaaatgtaaaagagtctttaaaatgaaaaatatttcacacttgtgggtttgatctaaaaatatcagtcgctatatgatatggctagacagatttgagtaggtataattttaatgaataatattgtgtgatattttagggtccaaaattgaatgtttctattaagtaacagatatttaaatgccaagcagaagctacactggcaaaacaagatttagtatgttatcttaagtgtatcctaaatcctctttcatcttatggagaagaaatacatgcttttagtttccagccactcctgtctatattcatttaaaataaactattatttatatcagatatgatgccatgtgagtccacaatttgtagtatagagaaataatttcattgaattattttggctgtttgtacctgagacctgattctgaatcatttatttttctatttaagttgtgctattttatgatcctacctatggctatgttcaaaacaatgacaaaatatattttaccctgatctttttttcattattatactttaagttctgggacacacgtgcagaacgggcaggtttgttgcataggtgtacacgttccatggtggtttgctgcacacatcaacccatcatctacattaggtatttctcctaatgctatccctcccctaaccccccatcccctgagaggccccggtgtgtgatgttccccgccctgtgtctatgtgttctcatcgttcaactcccacttatgggtgagaatatgtggtgtttggttttctgttcctgtgttagtttgctgagaatgatggtttccagcttcatccatgtccgtgcaaaggacatgaactcattcttttttatggctgcatagtattccatggtgtatatgtgccaattttctttatccagtctatcattgatgggcatttgggttggttccaagtctttgctattgtaaatagtgctgcaataaacatacgtgtgcatgtgtctttataggagaatgatttataatactttgggtatatatgcagtaatgggattgctgggtcaaatggtatttctggttctgtatccttgaggaatcgccacactgtcttccacaatggttgaactagtttacagtcccaccaacagtgtaaaagcgttcctttttctccacatcctctccagcatctgttgttgcctgacttttgaatgttcgccattctaactggtgtgagatggtatctcattgtggttttgatttgcattcctctaatgaccagtgataatgagctttttttgatatgtttgctggctgcataaatgtcttgttttgagaagtgtctgttcatatccttagcccactttctgatgggtttttttttttcttgtaaatttgtttaagttccttatagattccgggtattagccctttgtcagatgtatagattgcaaaaattttctcccaatctgtagtttgcctgttcactctcatgatagtttcttttgcagtgtagaagctctttagtttcattagatcccatttgtcaattttggcttttgttgctgttgcttttggtgttttagtcatgcagtctttccccgtacttgtgtcctgaatggtattgcctaggttttcttctagggttttgatggttttcggttttaggtttaagtctttaatgcatcttgagttgatttttgtataaggggtaaggaaggggtccagtttccgttttctgcatatgactagccagttttcccaacaccatttattaaatagggaatcctttccccgttgcttgtttttgtcaggtttgtcaaagatcagatggttgtagatgtgtggcattatttttctggcctctgttctgttccattggtctatatatctgttttgctaccagtaccagtctgttttgcttactgtagccttgtagtatagtttgaagtcaggtagcatgatgcctccagctttgttcattttacttaggattgtcttggctatacaagctcttttttggttccatctgaaatgtaaagtaatttttcctaattctgtaaagaaagtcagtggtagcctgttggggatagcattgaatctgtaaattaatttggacagtatggccattttcactccactgattcttcctaaccacgagcatgaaatgttttttccatttgtttgcgtcctttcgtattttcttgaacagtggtttgtagttctccttgaagaggtccttcacatcccttgtaagttgtattcctaggcactttattctctttgtagcaattgtgaataggagttcacccacgatttggctctctgtttgtctattcttggtgtataggaatgcttgtgatcttttcactttgattttgtattctgagacttggctgaagttgctcgtaatgttaggggcagccagagagaaaggctgggttacccacaaagggaagcccatcagactaacagtggatcactctgcagaaaccctacaagctagaagagagtgggtgccaatattcaacactcttcaataagggaattttcaacccagaatttcatatccagccaaactaagtttcataagcaaaggagaaataaaatcctttacagacaagcaaatgctgagtgattttgtcaccaccaggcctggcttacaagagctcctgaaggaatcactaaacatggaaaggaaaaaccggtaccagccactgagagaaacataccaaattgtaaagaccatcgaccctatgaagaaactgcctcaactaacaggcaaaataactaaccaacatcataattacaggatcacattcacacatgacaatattaactttaaatgtaaatgggctaaatgccccaattaaaagacacagactggcaaattggataaagagtcaggaccatcagtgtggtgtattcaggagacccatctcacatgcaaacacacacataggctcaaagcaaagggatggcggaatattttccaagcaaatggaaagcaaaaaaataaaaaattaaaaaaaataaaaaaaaaaacaggggttacaatcctagtctctgataaaacagactttaaaccaacaaagatcaagaaagacaaagaagggtattacattacataatggtaaagggagcaacgcaacaagaagaactaactattctaaatatatatgcacccaatacaggagcacccagattcgtaaagcaagttcctagagacctacaaagagacttacactcctacacagtaatagtgagagacttttatactccactgtcaatattagattaacgagacagaaaattaccctgatctttaacattccaggcaagtatgttttcagtcatacatagtacgtgaatctgttatattttaaatccaagcttttggaggacaaatgatttcacagttatacaactcagcctctcccagactcaagtctctcacttgatgcagtattcccaccccatcttcaataaaagaagaaagcatgaaacatcgcattgatatagggaaagtatatctgagttttctatatagcatataaagaagtaaaataactctgtgatttgtgatgagatagatttagctgcaacaatgaggtctggatattaatattggattaacttcctttgagattgcaacttccatgtggcattcagcactttccttgttttctcatatgtaggccgagaataaaattatcctgtttctatttcccaacatgaaaggtcttttaactgtttgaagacatatgtttcatgtgaaaccaaggaattgctactgcaattttgtaagacagaagttagcaaacttattctgtaaggaacaagatagtaaatattataggctttgcgggccatatggtctatctcacaactattaaactctgccatttttttttttttttgcaaaagcaaccatagacaatatgtaaatgaatgagtgtgattatattccaataaaactttatttttaaactacaagactagttcttaaaataaaatttaacaaagaactattatatgatccaataattccacttctgggtatatacccaaaataattgaaaacaggtattcacacagatatttgtacacccaagttcatagcagcatattttactgtagagaaaaggtagaaacaaatgtacactgtgtacactgaccaagaatggagaaacaaaacgtggtgtatccatacagcagaacagtattctgctttaaaaaggaatgaaattctgtcacatcctaaaatagggatgaactttggagatattccacctagagtagttaaattcttagacaaatagttgcatggttgccagggaccagggaggggtaggggaaatgagcagttcttgtgtcattggtatagagtttcagtttagaaagatgaagagttttggagatagatggtggtgatgtttacatatccatgtgaatgtatctaatgccactgaactgtatacacttacaatggttgaaatattttgtatattttcccacagttaaaaaagacaagcccatgtgcccaaattgctgatataaatctgtattcctattagtgagcagtaatgagccatgtttagtgcagctgatatggttaagatggaacaattgcatgtaatgcaatggtgggtaacatctaataaaaattggtactcaccaatttccatttccattgtggatataaacacccttcacattatgaatcatgttatttgttatttgtgtacttacttattaaatcacttttctccatctctctcacctctatgactctgtacatgtacaaacaacatacacactgtgaacttctttagaatgacagttacattttcgttacttgattcattgtttggccaagtagatacccagtaagcataactagcaagtgaataatgtatatgtgatcattttccttttcaaaaaccacttcttatctctaccacaccaccacacattattatatgctacacttcttatataaaacaaaaaagaataggccaggtgtggtggctctcgcctgtaatcccagcaatttgagaggccgaggtgggcagatcacttgaggccaggagttagagtccagcccagccaacatggtgaaaccccatctctgctaaaaatacaaaaattggccaggcgtgttggcgcatgcttgtaatcccagctacttgggaggctgaggcaggagaatcactggaacccaggaggcggaggttgcagtgagctaagatcatgccactgccctccagcctgggcaacagagcaagactctgtctcaaaaacaaacaaagaataaataagctttaataaactcttttgcagaagagttttcatttttaaacatagaggaaaaagaagatgaggatgaacgatagtgatgcccagaagagaaaattgtgtaagacaaaatcaattgaccaggcgtggtggctcacgcctgtaatcgcagcactttgggaggctgagacgggcagattatgaggtcaggagttcgaaaacagcctagccaatatggtgaaaccctgtctctactaaaaatacaaaaattagccgggcttggtggtgcacgcctatagtcccagctacttgggaggctgaggcagaagaatctcctgaacccagcaggcggaggttgcagtgagccaagatcacgccactgcactccagcctgggtgacagagcgagactacatctcaaaaaaaaaaaaaaaagattaaatcaattttagattgatatagagataaataattccctaagtacaattaaagcaaggatcagaccctgatgagtaaggatgatctaacaaagggctgacaatataaagtgaatgcgattgtcaccaaataaacatctcccaagagctttgggacaatcttcagctaagcatattctgcactttacatcgttctgccatatgccctatgtagcttttcatcctccagaaatttgaatagcacacagtattttttggcaccgagtaattgtggaacttaaacttcctacaaagagagaagctgtttcagtcagctaagtgaccagttagtaagcaacttctattctcttagtgtcgatagggttaaagacagtcataagctccccaaacccttggccgcctcaattttttcatttaaatacttatcttcttatcttcatctattttttagagtcacacataaactctgtctatgaggttcttaaagacctggacaatatatttaatctctgtatccttaaatctcaccatgatatctcaaagatggtagataaaactgttttccctcacttctctgactccataccaatacttaatcgatcgggaaagttttataaaccatttaccgttgaatataaatatatatacacacacaaacatatatatatttatatatatttatgtatatatatatttatatatctatatatatttatgtatatatttatatatatttatatatatttttatatatttatatatttatatatatttatatatttatatatatttatatatatttatatacttatatatatttatatatatatttatatatatttatatatatttatatatatttatatatttatatatatttatatatatatttatatatttatatatatttatatatttatatatatttatatatatatttatatatttatatatatatatttatatatttgtatttatatatatttatatatacacatatttatatatttatttatatatgtttatatatatatatatatggcactatatatcagtgagcaaaggcatcataatctttatttttatttctgtattcatttattcaacatatagtaattctgatcctgtctcaaaaactctacagaaattaacaaagaacacattgtttctgcctttttggagctgaatgtttagtgggggaaaatgtattttaaggcaataatcatatacatgagtgtatatttacaagccgcagtaggtgctatgaatgaaaagtataaggagctatgagatattctaacaaaaagaaatgctgcagtctagagactgagagtaattatctgtgaggaaaagtattgaagcagagacctgcaactcagtaaagagtgtagggagtcacatgaacaaagtcttgagatgttggtagagatcttggaatgttcgaaattctaaaagaaagcccttgtgtatggggtatggtgagagagggagagcgtggcaagttttacgttgtacaagtcattgtaggccacaaaaataagtatagattttatctaagtgcaacggaaaaccattacaagtttattttttgattcttaaattttgttttacttatttatttatttcaagacacaatctcactctgttgcccaggctggagtgcagtgacatgatcacggctcactgcagccttgaactccttgggctcaagcaatcctcccatatcaccctcctacctcagcttcctgggtagctgggactactacaggcatttgccactatgcctggctaactttaaacaattattttgaagagacagggtcttgttacgtttctaagtttctaaggctgatcttggattactgggcccaagcaatcctcccgcctcatcctcttaaaatggtgggattacagatatgagccacctcacccagcaaggtagtgacataatcattgtttttgctgaaaacaatgtactttagggaacctccctgaaaacagaatggccacttagaataccaaagcatagaccaagccttgagatggcaatggaagtggaaataaacatgtctttgatacttatgttaatggagctattagtagcaacttttgacagatttgaaagtggagttgaaagacagtgaagtgtcagggatgatccctgagcatattagataatattgagctggagaacagaaaagaaggggcagatttggaggtggagacctttctagatttatattcaatttgagatacatctgaaacatctacatgaaacgtggatgaaatatctgtgaccaagatacatacgtgggatacctaggcatgtaaataatatttaaagttatgtgagtgggtgcaataacctaaagagagactgtaggtagaagattgatcaggacaaatctttgaggaacttttttttttaattattattatactttacgttctgggatacaggtgcagaacgtgcaggtttgttacataggtatacacgtgctatggtggtttgctgcacccatcaacccgtcatctacattaggtatttctcctaatgctatccctaccctagccccccacccccaacaggcaccagtgtgtgttgttcccctccctgtgtccatgtgttctcactgttccactcccacttacgagtgagtccatgcagtgtttcattttctgttcctgtgttagtttgctaagaatgatggtttccagcttcatccatgtccctgcaaaggacatgaagtcatcctgttttatgaggtacttttaatgcatttagtgactgggtaaggaataaccctgaaaaggagcacaaaaaccatcgaggtatgaagaaagccaggagatgtagtttcacaaagcagccagtggacagtaatggacaccagcataagcttaagacagcagtgatagtgttcatcagtgctgaaaactcattggaagtggctgaccatatgttgattgcgaatgcaatgccttctcccatctcctattgcttttcactgtttccgtcatgtccagagtgaaaacactggggaggcagaactgtgtaccaagaaaaatgttttgtgtcagaggaaacaagagctcattaatttccttttgacccgcatggataggaatacgataagcaggagaaaaataaaacctgctaaactaggcaaataaagcttaatagaaaagagagaaaatattgcttacaaagggaagaagacatttgccacaatattagctaaaaagagagtgaggaaaatccacatttaccatttttattatgtgtttccaaagtcgacattaagtgaatattatcactttgaagacagagaatagattgtaagcagaagaggaagtgggattttttaaatggcatatatttaaatgttgaaaaacccatttccaatactcccactgagatatatgcaataaaaacactccgcaatcagtaatatacatgtgaagctcctaaaaatcctccattgagaagattctataaaactataaagtattattatttctgctatcagaaaataaacacatactttctaagaacaagatgaagaccttaattcatcttcccaggaatatacttgtgtacttaatggttcaaggcgtttgtgatgcaaaaaaagtgggacattatgtacaaaatagttttaatcagaaaatgaaggaagtttggtatggtatggttctagggttgcaagttttcctgcaaaaagggagtacttatggctaggtgatgcagccaaggaagcatctctgaggacaggttatcctggctcctattccaaaatatttaggtctccttgagtgttcgatccttgaaccaaggacaagaatagaaagaaataaaagccacttgtataaaggttgccttcattttgtgtcgaatattgacaggagaaagccagatttgtagcttttccagggataagtgagtctcagacacagttaagagcttggctttggaattagattgacctgagtttgaatcgtggctccatcaatctctgattgtgtgaatttttggcaagttttagctgaacctcaattttctcataagtaaaataggcataatacagctatgattctgacccttgccattagcactctgagctacttgtcagtgtatcctggtctcttcctcaagcacttttccactttgttatttcaagattctttgaaattatgaacagtagctcttgatcaccaaacaaatgggagaccatagattcaaaggaacattttagtaggatatttgataagctttgtatttttttgtgctttgaaaattagagtagatttagatttaaggaactataaagctatatgtttacaaaactttattcagttgggcagttctgactcagtaactgaaataaaattgatgaaaacaaaacatatgttttactgttgtgttcacatttaaagattatttaatgcataaccaaaataggttcagcaaatgtttatacatacatgtacttagatatttgtaattcttatggtagagcatgggaatgaatgagaattctcctaggctggaataaaactaatgtctaactaagaattggcctttcacttcacgaatatatatcattatatataaaagattcatcctttgttaacttatttgtttagcttagtactttctaagtacttttctatcctgtcttggtccctatataagaatgatactattataaaaatgaacatcctattatttcataatgattagcatatcagcatatttaagagcaatgcctatatctttaccttcattattattttcatgtttaaaatcctgataattctagaaaaacaaggttgtaattatccattcataataaaagtcacaccaagttattcttgataattaacttggcatagtggagtgcactgagcaattaataattaattacgtggttactagctcaaattttattgagaaccaaggagttaaaattaatagtattgtgtttgcaatgagttaattactttgtttctttgtttttttttttggaatagtgccataattagtatcctaatagaaacagaatataaagtgggtttctgagtgcttgcttgtcgaggtgtgtaacaacatatattttaattataatttgagtcactaattgttgtcaaatacaattttaatttcttagttcagagattaaaagatatgtaaacagctccaaaaaagaatatgataagatggtttatacaagtaaataaataactatatgacttcagaagttttatttaacaacagttgtataagtgttttaactaatgttaacaatgccttttttgtaaatctcctctaccacaaatatgagataaatttaagaacggcattttcattaaatattgattattaaaattcatatataagtattggctgtacctgagcatttacagtgaaaccatgaaggactggcaggtttggggctgtttgataatatccttccttaatctttcttcgtagcatcattgtttaattttggctgaccacaatcacttatgaaaagaaacagctcaaataattagtataacctctttctcttcataaaaccttcaaatcaatgtggtcataattatgaaagtgtaagattataaaatcttctcatttaaatatacatcttcatattagcagacttggctaatttcttcatttatccttgacatccacacttaaactctgtcaaactggtcattcatagactcattattcattcaacaaagattagtgtgaccctactatgattctgagggctagaaatataaaactgaataacatataaaccctgatttctgtatttatatatacagaaaggaattatgaactcacagttttaatgcacagtgacgagtcctcagttcatgtctgccttgggagctaggcatataccaaagcaggactgtctaacacagtttgggggtctcagtctggaaggatccgggtgagatgatccttgaattgagttctaaaaaatgaggagaaattatccagataatggaaagtttaggagaaattaaccagataatggaaagtttaggaaagaaacactatttatatgtcaaggacaaagtttgaccaaatgtgtctctgaatctaactggctttatgtaagataaaattaaaaaataattgtcactaaggtttttcacatctgcagcaactaccatcatatctggctcaatatttaaaagaaatacttaacgatttttggcatttattgctactataatagattgtgctatttaaagagaaattctagatacatgccaaagtattttcaggtgaagtaatgtgattcgtgggttttgttttgacaaacttccaaggaaattatttttaatataaagagcaatggaggaagattaaacaagattcgcaaatgttgataattgctcaaggtggtgacaggtgcatgggggtccataatatactgttctctttacttatatatgtctttgaagattttcatgatgtaaaattttaaaatcagaattacagtaatacctctttctttgacaatcgttttcaaacttggttcaacaactgaatttaaattacctacatggctataaaaataaattagatatcctggttatttggtctggggtgggtcctggccatatctgtagggtgtgtgggtgtgtgtgcatttagcttcacatttgactctgaagtacgtggaaaaccaattctgggctctacatatgcaattccaatgcctgacattaggtggtgctggttgtgagccatgatttcaggtttgacttgtagagttaacagaagtgatatcaccaccgatcccacagaaatacaaactaccgtcagagaatactacaaacacctctacacaaataaactagaaaatctagaagaaatggatacattcctcgacacatacactctcccaagactaaaccaggaagaagttgaatctctgaatagaccaataacaggagctgaaattgtggcaataatcaatagcttaccaaccaaaaagagtccaggaccagatggattcacagccgaattctaccagaggtacaaggaggaactggtaccattccttctgaaactattccaatcaatagaaaaagagggaatcctccctaactcattttatgaggccagcatcattctgataccaaagccgggcagagacacaaccaaaaaagagaattttagaccaatatccttgatgaacattgatgcaaaaatcctcaataaaatactggcataccgaatccagcagcacatcaaaaagcttatccaccatgatcaagtgggcttcatccttgggatgcaaggctggttcaatatacgcaaatcaataaatgtaatccagcatataaacagagccaaagacaaaaaccacatgattatctcaatagatgcagaaaaagcctttgacaaaattcaacaacccttcatgctaaaaactctcaataaattaggtattgatgggacatatctcaaaataataagagctatctatgacaaacccacagccaatatcatactgaatgggcaaaaactggaagcattccctttgaaaactggcacaagacagggatgccctctctcaccgctcctattcaacatagtgttggaagttctggccagggcaatcaggcaggagaaggaaataaaaggtattcagttaggaaaagaggaagtcaaattgtccctgtttgcagacgacatgattgtttatctagaaaaccccatcgtctcagcccaaaatctccttaagctgataagcaacttcagcaaagtctcaggatacaaaatcaatgtacagaaatcacaagcattcttatacaccaacaacagacaaacagagagccaaatcatgagtgaactcccattcacaattgcttcaaagagaataaaatacctaggaatccaacttacaagggatgtgaaggacctcttcaaggagaactacaaaccactgctcaaggaaataaaagaggatacaaacaaatggaagaacattccatgctcatgggtaggaagaatcaatatcgtgaaaatggccatactgcccaaggtgatttacagattcaatgccatccccatcaagctaccaatgcctttcttcacagaattggaaaaaactactttaaagttcatatggaaccaaaaaagagcccgcatcgccaagtcaatcctaagccaaaagaacaaagctggaggcatcacactagctgacttcaaactatactacaaggctacagtaaccaaaacagcatggtactggtaccaaaacagagatatagatcaatggaacagaacagagccctcagaaataacgccacatacctacaactatctgatctttgacaaacctgaggaaaacaagcaatggggaaaggattccctatttaataaatggtgctgggaagactggctagccatatgtagaaagctgaaactggatcccttccttacaccttatacaaaaatcaattcaagatggattaaagatttaaacattagacctaaaaccataaaaaccctagaagaaaacctaggcattaccattcaggacataggcatgggcaaggacttcatgtccaaaacaccaaaagcaatggcaacaaaagccaaaattgacaaatgggatctaattaaactaaagagcttctgcacagcaaaagaaactaccatcagagtgaacagggaacctacaacatgggagaaaattttcgcaacctactcatctgacaaagggctaatatccagaatctacaatgaactcaaacaaatttacaagaaaaaaacaaacaaccccatcaaaaagtgagcgaaggacatgaacagacacttctcaaaagaagacatttatgcagccaaaaaacacatgaaaaaatcctcaccatcactggccatcagagtaatgcaaatcaaaaccactatgagatatcatctcacaccagttagaatggcaatcattcaaaagtcaggaaacaacaggtgctggagaggatgtggagaaataggaacacttttacactgttggtgggactgtaaactagttcaaccattgtggaagtcagtgtggcgattcctcagggatctagaactagaaataccatttgacccagccatcccattactgggtatatacccaaaggactataaatcatgctgctataaagacacatgcacacgtatgtttattgcagcactattcacaataacaaagacttggaaccaacccaaatgtccaacaatgatagactggattaagaaaatgtggcacatatacaccatggaatactatgcagccagaaaaaatgatgagttcatgtcctttgtagggacatggatgaaactggaaaccgtcattctcagtaaactatcgcaagaacaaaaaaccaaacactgcatattctcactcataggtggggtgggaattgaacaatgagatcacatggacacaggaaggggaatatcacactctggggactgtggtggggtggggggaggggggagggatagcattgggagatatacctaatgctagatgacgagttagtgggtgcagcgcaccagcatggcacatgtatacatatgtaactaacctacacaatgtgcacatgtaccctaaaacttaaagtataataaaaaaaaaaaagttcgttcctcttgttagaattttcatacaaatgcaagactccttattttcaaagagaaaacaaaattttatataaactaatacctgagaagaataggaaaaattaatgatgtatgggataggtactgataagaacctcttcttttgtgtacattgtgataaactaatgtttaacttgagtcgatgtgctggaaatacttgttaaattttcaagaattttgagatctgttaaacacaaccattatcaaaaattaaattatggtaacttacattaaatgaaatatattgttcacaaatgtactagatgcacaaaagtcatcactacctaattcttttattatatttcactattatctacgggtttgttacctgtataatggaatgactgtataatggtgtagtgctaacttcatgtttggtgacattataatgatagcttaaaattaaacatactgggaatattcaaatatgtccttcctctcaggggatctgattgttagacatttaccagcatagcactgtcttaattaacatcatataattgtcttttatccttaagatgttgagccagtaaatatcacaggagagtttgttccttaggttttaatacttgctttaccagtttactgtagcatcatgtgaaaccagcttctagaccagctgtctttaattggtatgtacccaagctaatccttgtcaggctatcatcaacccaagcacttttgaagttatttttattattacgctacagaaagattttatggcctttttgctcttttctttaccctagccctaggatcatataatttcatctcctatttattcctatttatttccttatctaaaatcttacttaactagcttgcttgcctgcctgtctgcctgtctgcctgcttgcttggtttttctttttttctttcttttctttacttctgctttcctttcctttcttttgtttcttccttccttccttccttcttcctttcctttccttctgttccttttccttttccttttcctttgcgttcctttgctttccttgctttcttcgcttgctttcttttcagtaccacaaaaaaactaacaataacaaaaatattgctacaaaaattgtgacctcccaattctatcctcatttcacggacccataaaatgattatatatctatgccaatgcgttctaactacatgatattattattgatgataagagaatccaaccctcaagaaatgaagtattataatgttttagaacacacagaagcatttttaaccaaaatgttccatgtgattttatagggtgcatgttttaccttttcttatttggaaaagtagcaaaagtattaacaaataaaataagttacatactctttgtatataaatctttcgtgtacataataatgccatttcccttctagtgcttccattattgaaaaaaaatagacatatagcaacgtgctagacattgaagttaactgttaaaaagtcatcagagggtaatgttaaaggtggtatttcaggtaataaagcatatgcagaatgattctattggctttatttccaacatgagtgttattagtaccaaggacactgaagtttaaaggaggggagtgatgagactgatcattactttgtcttctgtaacaggacttaggtggcccagagtgatccttgttggttgattggttagttgaacttctatttttgttactaggcctgcagatctgtggaatctccagagtgctgtgtaatgttacataggccacacaccagacactgttccctgaaggactgaaggtggaattggaacaatatgtagacagttcttgttgcagttaccaaggaaatttggttaggattcaggcctccatgtcagaaaaggaagtctattttatgtgctagaaaaataaccctaatcatcttatcttgggtctctctggggagcatgatgatctacctggtcttgtaaactgtatagaaccggctgggttgagacacatatgtctcataacagagcttccacttaaggctataaaatagtggtccctctattgggtatatgccttatggaaaaatatacgttatgctggtacctattataaaaaccaatgcaaaatgattagagatttctaatccaagtgttatcctcatctgctcccaaaatacagcaatgaaaaaatagaaaataaaaaaggatatatttacagaactgtatttacagaaatatatgttgatgacaagataatcaaatacatatcaaatcatgatgtgtatttacagaaatatatttacagaaatgtaaagcagagaatggggcggaagtccctgacagacttgacactgaaccacaaaacaacagtggaagccaggaatttggatgctgcgggatagttgggattaaaattgcttcaagcaaggtgtggaactggagacaaactcagtattcaaaaccagaggctgggctgtggtgcttgcattcgtgaaagaaaacctggggaaaaagtgcttcttcaggctgtagcctgacgctatggcttgcctaaacttatgggcctatgtaggtgtaagaataaagacatagccttgctgctgggaactgtgttgcatctgttctcttgcttgatgaatggattgaaattatccccagtaacattgcagtgcaagaactttaaaccttaaaggggtggctggagaccacgggacgcgatgcacatgcaactactaaatgctagatgaggatacctgaggagagagaacaagacacaaacgtgaacatggacctccaatagaaatgacaatcgaaaacatacatttatcttctctctctcccaaattgttcaaagattacgctaagggaataaaaacaatacagtcataaaatgacaaataaaatggaagaagagacatctgcacagacatatcaagtcaatgagatgaaaattaggacaagtaagccaatttgtttttcaggatcccagaaaaacttgtggattgaagacgctaggtgttttagaaggccatatattcccgagaggggctggaaataaaggggttgttttgaatcccttaaaaggggcaattacatttcatgtccccagctcagggtagttaattagacactactcctctctcatcccagcagacgtgagtgagtggtttgctttctggtgaggctgaaacaacttttggcatttggacaacaggattagttgatggaagagagagccaccatactgaaaatacaggattaagttaaagtcaacatatttaatggtgagaccagcagtccctcttcaccttcttggctcttaagtttctatcctctgggcagtagattataaatttattctcctgagagcctacctgcaatacgaaaactatttttagtcaagttttattgctataacaaaataccatagactggatgccttataaacaacagacctttatttctcaccgttctggaggctgggaagttcaagatcaaggcactggcaggtttggtgtctggtgaaagctcatttcctgtcttctcactgtaacctcacaaggcagcaggtccaagggaactgtcttgggcctcttttgtaagggtactattctcattctggatggctttggccttatgacctaattaccttccaaaggccccacttcctaatgtcatcaccttgagggtgaggatttcaacgtataaattttgcaagaacacactcagatcatagtaacctacaattaatgatatgtaatgatccaccagtgaaatagccagatctgtgcctaatgaccatatattgaagcccaccaagtataagccctacatacgcacaaggaatttccaaaagcatttaatgcctcagttttaagagacaatcaaggatttccagatatttgaacatgtctcaaagatggaagacagaaaccaacataaaaacaaaaagcagaaatattgggaaaaaaacaatagccacataaatgaaacagaaatctctgcagaaagagagacaaggcatagaccttaagaaaactttttaaagatagctataaaattattatctcacagtgagactagtcactgtattcataagaaagaacaagagactatagaaggtggtatttccgagaaagataagggttatttaaattaatagtatagcaggttaagtttttaaattcttaattgtataaatttatgggttaccagtgtaattttgttatatgaatatattttatagtggtgaaggcagagcttttagtatatccaccactggaataacatacatggtatgcatagcagttttagagcaatgaaactactctgtgtgatactataatggtggatacctttcattatatatttgtccaaacccatagaagatacaacatcacaagcaaactctaatgtaaactatggacttcgagtgttaatgatatatcaatgtatgtaagtcagttataacaaatgtaccactctggtgtgggatgttgatagcggggtaggctgtgtgtaatgaggaagggggccagagagtatacgggaaatctctgtactttcccctcgattttgctataaatgtaaaattgctttaaaaaatcaagtctattaaaaatgaagagcagaaataaaagttcaaaagtagaagataaatttgaagaaatatctcataaagcagtataaatagccaaaagcatggaaaatgggagagtataagaatcttagaagatcattctaggtaagtgtttcacaaatagaggtgattttgtcctgcagaggacgtttgacaatgtacggagacctttttcgttgtcacaaataaggaaaggatgtactactggcctcttgtgaagagtgacgcaagaggaatgcaccatgcagccatccacaaccaagaattactcatttcaaagtgtcaatagtgtttatgtttagaaaccttgttctatgtaatccaacattcaaataatagatgttaaaaataaaacagaagagaggcaactgtggagagaaaattatcaaagaagtgacaacatcagttttcttagaactgaagaaaatgagtgtccaggtttaaagggcttactaaatgcccagcacagcaaatgagctaaaaatctacaccaaggctcatcatcataaatttttacaaaaacaaggacaaagagaagttcacagatcagaaatcagaatggctttggacttttcagcaatagccatggaaaatagcagaaaggaacacttcctttaaacttctaggaataattaactttggctttgatttcatatcctatatgaaattatgttcacaaattctgtgatgctcttctattcaagagttacagctaaatgtccctgtcattgagtgtggactagattcagtgactcttttgtgatgatatgtcatttccaagtgtaggttgtagaaagactgtggtttatgtcttgtgttctccatccacgcctatctctctctgtgtctctctttctctctctctctctctctctctctctctcatgcattgcttcttctgtgggaacacatgtcatgagcagccctatggagatgcacgtatgctgagaaactaaggcctcctgcaaagagccacaagaatgagcttagaagtgcatcatttaacaccagacaaatctcgagaggctgcaagcatagacaacagcttaactacaacctcataaaataagctatgccagtcccaccctgctaagccactctcagattcttgaccttcagaaactgccaaataataaacatttttgtttttaagctgctaaattttggaatgacttgttattcaacaatatataaattgtacaccctgataaactataaattgtgcggagaaaataattttcagagatagccttatgtactcccctaaaccttttttccccagaaatctattttcaaaaatatactctaccaagtgaagaaagaaaccaagaaagacaaagaatgtttagttgtgattggagatcagaaggagagtgttttaggcatgattcgccttgttatgctgcaataataagcaattccaaaatattagtggctagaaacacaaaggttgattttgtatctttgcaacatatccaacacaagtcagtcaagggttctgatcattgtagtcactcaggaatctaagctgattcagtctctagtattctatcattctaccgtaacaataagaagctttagcgttcaccatgtcagtcaaaaatgcgtggaaaattttaaactgactcttacatgcctctatgtaggagtgatatatgtcattttcatttcacttcatcatccaaaggaagtcacgtggtcatgcctaactctgaggggacaggggattataatcactaatatttttaagagaggtaagagaattaggaaaatattggagcattagtattacctgcaaagcctaggatccggaaaacagagaacccaacgtgggaggaagatgcaaagtggtgccagaaagatggtggaggagatcctgtaacaacagctgtataacagttgtagagagaaacctgtacagattggagaagaaaatagtgctccaggaattttgttaccaagaaaaaaaaaatctaatgtattcgaatgtattgagaggtggtattcttattgtgtaagagtataatatatgacatgtatgacagacagaagtaccatttaaaattttattaaacataagaattagatccctatctcacactgtacataaacataaaaatggtaaattgatggattgcctaaacatgaaaggcaaagcattaaaatatataaaaatattttggggcatgtagggcaaaagaggtgtcccttaagcaacagcacaaagcaaaaattgtaaagaaaaagacatatatttgatcattttaattaaaaacctgtacaatgcaaagacttcataaacaaagaaaagacataggctcagatagtatatttgcaatactaaaacaataaaggatttatgtcataatttaagaaaaatatttacctatcaatagaacaaaataaaaataacctaacaggaaaatatttttaaagtttaaaaaataatagacagttcacagaacatctgtatgtcaaatacacttatgaatagatgctaactctcatttattattggaaaaattacttcatattagtcggttttcatgctgctgataaagacatacatgagactgggtcatttatacaggaaaaaggatttaatggacttacagttccacacagctggggaggcctcacaatcttggcagaaggcaaggaggagcaagtcacatcttacatgaatggcagaaggcaaagaaagtcccctttataaaaccatcagatctcatgagactaatttactatcacgagaacagcatgggaaggacctgcccccatgattcaattacctcccacgaggtccttcccacaacatgtaggaattcaagatgagatttgggtggggacactgccaaaccatatcgtactaagtgagataacgtactcccatcggactggaacaagtaaaaaataaaataagattgtgaaaggtcacaaactctcattcttgtagaaatttaagttggtacaaccaatttagagtgtaatttagcaataatctagttaaactgaggatggcatgtcctaccaaacagcattccagttaatcacattgaagatagcatgattgttctcaggcttccatattttctgttgaacggtaagttgtcagtctaattggcattcctttaaaatagacttgtttcctcttgatgattttcacattgtaattttgtctgattttcagcacttcaccggtctttaaatgattatgtaagattttcattgctgaggaggaaatcctatcacctcaaatactatcttattagttatattttcattttattttaccatgattttaaatgaattccttaaaaaattaggttagagaactaataaatgataaagagaaaaattattcttcatcctgatagctgttatgtgagggtggaatggtatggctggtttttttcactgtcattttgtaacttggaaattcttattttttaatacaatgacaatattttcatagttaaaaaacactaaaactaaaacaatagtctgttaatgacaaatttaagggcgatttcattaagttaaaaatccatgttaaggcattataagatgaataaatactccaaatgaaaacaaagtgaaggccacttttatttaccttttgtacatgatacttatttttcaacagttgtcatgttagaaaaagttgaaaaaataaaacaagatacacccccttttggcctctaaccttccaaaattgtaatgggtagacttcaaattaaatatctaattcgactcctttccacttctaccctcatagcattagagacatttggaaaaatgaaaaaaatatagtattttatggcagggtacctcaaccccagagccacagacccgtaccaatccgttgcctgttagggacccgattcgcaaagcagtaggtgagcagcagcgggctagggaaggaagcttcatctgtatttacagctgctcctcatcactccatttctgcctgagctccacctcctgtcagatcagcagccacattaaattcccataggagcacaaaccctattgtgaactactcatgcaagggatctaggttgcatgctccttatgagaatctaatgctgcatgatctgtcactgtctcccatcaccccccagatgggaccatctagctgcaggaaaggaagctcaaggctcccactgaatctacattatggtgagttgtataattatttcattatatattataatgtgataataatataaataatgtgtgcaataactgtaatgcacttgaatcatatggaaaccatcctccaacccggtccacggaaaaattgtcttccacaaaatcagttcctggtgccaaaagggtcagggaccactgttttatgggataagtgaaagctggatttgaatccaactctaccttttacttcccatgtgaacattaaaagatgacttaatgtctctgaatctttttttccttctaagtaataactaccttgcagagttattacttgaattggccataaggtaaagaggacaccaaatacagtaaataataacataataataaagaaaccttatgaattctattcagtgatatccatattgaggtatttaaggtgaatgatactgatgtcagcagtttacctggatatgcatcaaaaatatgattgattgatggatggatcggaggaaggaaaagatatgtgatcaaaacgagtatagtaaaatgttcatggtggaatctagatatatagatatcacttgtaatttttaaaaatgttattgcatttttgaaatttgttatgttaaaatattgggtgaaaattctgatgccctggccatgtcccaaatcagttgaatcagatctctggtgtattttttttttaagatccttggatgactccattgtacagcaagtttgcaaaccactattctaacttctcaccacccccttctttatagcttacaaaattatatttttaaatgtcaaatgtcacaatttcactttccttcttcaagaactgattagacttctagcttctcctatgctctcatcttgcataacgttcatttgcacgtggttaaaactgataggcaataaataataacccatctgtcttttcctgacccaacataactaaaaccttcctttcaaggcgaaaatgaactataatctcacagacaagagtagctatagacaactaattctttctggtctctcgtggtcatgggactattcaccactgccgtccctgctgtctatttggtggaccagccagttttactgtgacccataccatggctcttgagaagcatgaagctgccgaaatcgcagttgtagggttaatggaaaacatggtgaagtatagcttacatatatatacaattttggcacaaaatgaagcctaagaaattgtaccgggctgggtgtggtgactcatgcctgtaatcccagcactttgagagaccaaggtgggcggatcacctgaggtcgggagttcgagaccagactgagcaacatggagaaaccctctctacttaaaatacaaaattagccaggcatggtggcgcatgcctgtaaccccagctactcaggaggctaaggcaagagaatctcttccaccctggaggcataggttgtggtgagagaagatcacaccattgcactccagctggggcaacaagagcgaagctccgtctcaataaataaataaataaataaataaataaataaataaataaataaataaaagaaaaagaaattgtaccaggaagtggattgggaatgctctatatattctccccctccaagaagtttttttaatttattgtattgtgaaagatctgcagctatttattttgtgtggtactcttttgcaataaactacttctgcataaatgaactcaaaaactttgatattcatgaaccttcataatgttgatctagtacatcttgcccaactagcccttgggccattccttccatgccactggttgaaaaatatgctccccaccccagtaacatcagcatcagacctctgcaaccagaaagattccataggtaatgaaatccaaatgctggcatttggaagtcaaaccagtgtattttgaaatggaaaggcaaggggaagtgcatggagcaagtacagcatgtgctacaacttcagttcataccctccttaaaatactgtgcaactaaactgtcaattgcccattgatagagatagtatctttttcagctttacaccttccgaattcaacacactgctagcctcaggactaagcgctcaataaatgtttatcaaaagattgagtaaatgaatcagtggtgaaataaaatgtacaaacacatacgcttcatacacgtttaggaagcatttctagtgagctttgtggatattttatttcttaaaggttctttttctttccatgttcatgttattctttattttttaaaatgttgcttctgcttatttctctttctacggcagctatatttacttgcctgagagcacagcatatactgatgttaatcaaactttagatgaaacacctaaaatgatagaaaagaatctgctctaattaaataataaagcaacccctacaggtttagacatgtgccttccggtgtgggaaagaaaaaatttaatgaatgtagtagttttatgccaagaacatttccctcgtgcacctgtgttttaataagatagaatataaaatagcaaaaggggcccgacttttgtgatgatatttactcataaggtagtaagtcagatgtgatgacattttctttgacttagagctgctatacttgggtcagatttcagttcagtaaatttgcagtgaagttgtctttctaacatggtgtcatcctggaactgccctgctcccacagttacatacaggctagggagtgggtaggagtgggggtgaaatcctcttaatgtttatggtgtcagtagattcaaactaaaattagccttacagccatactcctaataaggggcccctggcatatttaattgatttaacaaatttatcaaaaatagataaactgaaatctgccttgaaattaattactgtatctctatttttataagaaaatattttggacccgttccctctgccttatgggtgcaactcccggcagaataggtcatgtctcctgaaaatagttcttattttctttactacttatgacctcttatagcctagaagtttttccttgctatttctagttgaaatgctaatctggcataatttctagttgaaatgctaatctggcataatttcagaactaattttctgttaatgccacttggaacatctaaattcctcctttttcaataatactatatttgtgtgttgcaaacacacacaaatcatactatatttgtgtgtatatatagtaaattccaacttataaaagtaaaattggaatttttttctttctttggaaaattattttataattgagaattataaatgtcacttttttaaatgctgcaacctttgagattggtttcaataaagtaaaacttagtaaacattaagaaaaatgatagcttgatatgttcactaatatggtaaatgaaaacttttatgtgtgtataggctcttgttaattataactaccttcacaggaaaaacagtcttgtggaaggtaatggtgccagtgagagaaaatagagaaagtagaatagtagtaagagagaaaatagaatttcccgtttagaataaagctaagtaaaaagtgaattgtttcagttttatttatgtatttgtaagtgtggtctcatgccatatatattcaaagatagacagagatcttaatctttaattttttatggccaaagaaaatgagtcccatgtaaaagggacattttcgtaagctgatctcaagtggtgtattttgatttgccgcagcagcctatggaagaaatatcattttggctgcctaagaagaaaaatgtcatacctttctattttttattcatactccgcatatttggaattcgtattctcaccatacttttgggaagataacacgaaattgccttacttgcctcgaaatcaaaatctgccattcgttttaaaataaaatggctttttcatctcattttcctttagcagaaaaaagtaagttaaatttttttgtagctgtgttaagtgtactgttcctccctcgttgagaacgaaacaaagacatatgattccatttactgtaattgttttggtttgcccaattacaatagcagtaaaatcatttacacatagtaaaatgtttgagccttaaagggcaagaagactaaatttagctgaagatatacaactttcatgtgccaatgaggaaatgtataaaatcagttatacatattttcctcattcatagatattgaaaatattcatatatgtgtacatgtatttgataacttaatattttctaaataacagaaattatatactgtatatatatttggatattatgattattgttattgccaccattgagcacttactatgggctcagaaaacttcactgtattatttttaattcttataacaaccctgtgaaatatatattatgcctatttcacaaatgagaactctgaaatcaggaaattaaatcacttgctgaagtttacaaagcactgttaggcaataaaacagaatttcaaactcacgtttgcttgtcttcaaattttgtatgctgtacaacctgattgttttactacttgttcttaatttcaaaaaaaatcttcatactaaaagatgatactttgggagttctaaagaacatgtttttggccgggcgcggtggctcacgcctgtaatcccagcactttgggaggccgaggcagaaggatcacgaggtcaggagatcgagaccgtcctggccaacaaggtgaaaccccgtctctactaaaaaatacaaaaaattagccgggcgtggtggcgggcgcctgtagtcccagctactcgggaagctgaggcgggagaaaggcgtgaacctgggaggcagagcttgtagtgagccgagatcgcgccgctgcactccagcctggttgacagagcgagactccgtctcaaaaataacaaaacaaaacaaaacaaaacaaaaaaaaccatgtttcttttcagaaggtatactcatttgaagtggataccaattatttgtattaaaattacttatggataaatttgaatctgcaaaaattaagtgcaacattattttttggcacctgttataggaggtaaaaatggtgattcaatatagtttctacccttagggagcatttagtgtggtttagacgtaatgacactaatgtaaattagagtagaataaattctttaaagcaggacaaaaggagtgttaaagactacaaagtttcagttatggaagataaaattctggagatctattatacagcatagtgcctatagctaataatgctgtttcggacacttaaaatttcctaagaaatcttatgttgtgttcttaccaccagtaacaacaataataaaggggacaagaggaaattttgagtgatgacagatatgtttatagccttcatggtggcgatggttttgtgggtgtatacttattcccaaactctttgattttatatatatatatatatatatatatatatatatatatatatatatgatgaaactctttgagatatatatatatatatgtaaaatatgtacagctttttgtatgtcaatcatacttcattaaggtggttacaaaaaagaatcaagaaaaataatcaccctaataaaaagagtgttattaaagaggggagggattacttctaattggtagtatcagaaaggttctcatggaggaaggtatagaaaaatttaggacaatataagcaacgatactttaagaaaaggaataatataaacaaaaataaaccaaaagatgaagaaccaccaaggatgtttctgaaaaatcaagagaaattccattttgatttgagagtatgaggtacttgtcatgatatataatgagaagtgtctagaaatatgttattttgagcaaatgctgcttagaaaggaggttaggttatttattaatccattcctttgaaatataaatttcatgatcagaaacacgtgagtgtaactatccaataacaacatgatttatttccaagaggatagtatattataggagaagtaggattttttctctttcacaagctaatacagtgtttactgattcaaatgacacttaaaaaaaacaagaaacaaaaaacatacactataagctatccttattcagctatgttattgtcttgcattcctgattagaaacatacaagttagactcccaaagtctcagttttctcatttgcaaaatgaataaaatgatagtacctaccccaaggtgctgtggagtatatttaatcatgtacttaatctgaagttttaattagagtgcatagcatatatttgtggttgcttttgctcctatttctgggtaaaagttcctacacctattatatatgttttgtgtttgaatgaagagaaaggcatcattatttcaaatatcccctctagccaacaaatgaaagctaagacttggaagctaggatgtctaacaccatatcctcttcatgtggactatatagtagaggatatgtaaattaagactcaattaaatgctcacattttataaaggagacccttgaatatatcaaatcctcagagagtatgtcagtttaaacttattaagaaatttaaattatttaacttagcctgctgagtcagtttctgtagctgatttctccaaaaggtcttggtattaaaagtagcattacagatcactaatagcaaactatttctgctactttgggtatttttacagggtgctaattgtgccaaatcaagacattgaaattgcataattttaggttaatattagcataatcctacatattttttcagaagcagtgcaggaatagtacaccctgaatatttttccatcatgatggaattttcaaatatcacaacctttacattgtcagttgtctgctggaacattatattgtgtcaaagagatttataaaagagaagggcaaagaaaatttgcggagttctagacaatagtaatatcagggacacttttgctttctttgttattactaaggagttaaataatcagataccaagcataggtaaagaaatgaatctctaactatttgagtacttatcaatttatctcaaggatatttacggtgttttcccctaagccaaaatagagtgcttaattaaggtccccttagccccctaaaaatcactcaggccaagtttctgatatgtgtgtatacttatatacatattaaagtatatgtatttttgtgtgcactttcagatcaaaaagtcctcgtttatctaaagcaatttcagcttattgatgaggcttttctgttacagcgtcctcctccacagatctgcctgtctagagatttaagcccaataagagtccagcaaagtttaaacaacactttagaaatctaaagaattttaagatttattttaatagtcttagtgataacctgaattgtttgtgagttcttacaaataatgcaatcaacatttaagtaattttattatttttttgtttgtataaatttaaggtatacaagtacatttttgttacatggatatattgcagagtggcgaagtctggttttttgtgtacccatcatgcaaatgatgtaccttttctccattaagcaatttcctatccttcgcccccatcccaccctctcgcccttctgagtctccagtgtctattattccacactctgtgcgcatgtgtacacattatttagcttccacttgtaagtgagaacatgcaatatttgactttctgtttttgagttattccacttaagatgaccaccagttccatccatgttgctgcaaaagacatgatttcattctttactatggctttgtagtatttttcattgtgtatatgaaattgtttattccatacgcaatttgtgtgtgtgtacatatatatatatatatatatatatatatatatatatatatatatatatgcttagacttagaagctaggatagacacacaatggaatactacacaatggaatacattcattcacacacatataaataaaagaatatgtggagatatatctccacatattctttatccaatcatctgtttttaaataatgctattgacttctttagggtgaattttatcaatattgttttggtttaaaacactcaccttaaaagagtcacagtccctaaatgtgcatcctcatatttaaattaggtctcagtaaatttgtgcaaagtgtattctttttaggatggtgttgaacttgctaaattatttatctttaagaatcatcattttgtgtcttttattaatgaaaacaacaattatgtgattgctgatatatttggaaaatgatttctgatgtagattgatttttttattctaaattctgtgtcggtattaaaaatttatagattactaactgtattaatatcgataatactaaattttattgctatttataacttggagtgtactttcatcctcctgaaaaagctgaatgaggtaggcagtattattctgggtttatgtgtgagataactgagactcagaggtaaaatagtgtatccaagcattcatggctcttaaatggaagatataaggggtttgtgaaattactcatggacttttttattcattcattcagttattaaaatgtattcaacatttatcatgtaccaggaacagcgcttagtaccaggaattcaaaggtgcataaaacatcttccttattctaagaggtacatagtgtactggaacaaacagccttgtaaatacataattagaacatgaagtagtatgttaatagaggttttcacaaagctgtggaagcttgtcttatgaagtaactaattccaagggagagaagccttatggaatagtgacattttagatagggtgtcattctaaaatacagcaaaaggcccacagtaaaaaaggaattttggttgttatgaaaattttcagattttctatgttttcagtacagtatacatggtgggctatgtgaatgtttgtatagggaccaaagtaggaagtgaggttgtctgttagagagcgctgagaaaccgaaaatagggagagatgagttggaatatgctgaggaaaagttattaggagttttcaagaaaggccacgacagtggggctagagagaagaggctaaattaaagagtcatttctggtttagaattgataaaatatagagacaagcatgataagaaagaagtcgagaagtaaacgatggtctcaagatttctagcttggaaatcattgactaaaattaaaactaaggactggattaggccattcttgcattgctataaagaaatacctgagactgggtgtttataaagtaaagaggtttaattggctgacgattctgcaggctctacaggaagcatagcaacatctgtttctggggaggcctcagggagcttttactcatggtggaaggcagagcaggtgtaggcatttcacatggcgaaagcagagagagagagttggtggtgggggtgggtggctacctacttttaaacaaccagatcttggagaactcactcattttcatgaggacagtaccaagaggatggtattaaaccgtgagaaaccaccctgatgatccagtcacctctcaccaggccccacctccaacattggggattacaatttaatatgagatttgggtggggacacagatccaaatcatatcaaagacttgcatgggaaaataaggaattgttgacataacatctttgaggttcacatcaaatgttctgatgaggatagtccaagtagcagttggctatatacctcagataagggctgaaatttggagctatgtcataatcagcctagattaagagtcaataatctcctgcccatgggccaattacacccaccacttgtttttgtaaagtagtattgaatcccagccatatccatttgcttatgctccatgtataccttttttttgaacttcaaggcagagttgagtagttgtaacaaaaaccatacggcccacaaagcctgaaatatttgttctcaagatctttatctataaagtttgccaatacctgctgtagatgttagttgaagctttgaaagcaaatgaggtttcataaggcagtgtccatacaagacatttaacaagtttacctataaaaactagaattcctttgaggggaacacatcctagtctccattaagcacagtagaagagtcccctataatgggaaagaggtcactttaggtgttgatgttggtggtacaggtcaaagaaaatttatctttgctgtttattcagaatgcaataagtgaagttatgagaaataagggaaaaaatgtgtagaatttcaacagcgaagagaggggataaaggcatgagaatgagttcctaagctcaagtattataaacactgtgagaaacttaaaatcaaagtatgactccaaacgtatttgaagcctgagaacaaggctcacaacctagggaggattagggatcaataaaatagagtgttacaaagtataatgtcaatccagagttgtaaaaatatcagcattgaatatattgaaagcagtaaaactgaatgaggagactatcattttatatcactgtgtttatttctttgccttgttctataaatatttaaaattataaaatttttattaacagtgagagcagaactaccagagtgagcagatcaaaattgggacagatgcttttcactgcacacacttttatttttctgctgttcatgcattatcttgtacagtgcacatgttttacctaaaaaattaaaatggagtctcctgcttaggaaaaaagtatatattctgtttcaaactatatacaaaaataaaatcccaggtgactaaaaactgacatgagaaaaaaacaaattgataaagcttttacagtaaaatagaggagaatatgttaattaatatagggtaagaaaaaattgcttacacaaatgatgaagcactaatcatgaataaaaataataaagtggactaccttgtatattaataacatctatacatcaaaagacagcactgagagagtaaaaatgaaacccacagagtaggataaattatttggaatacacacataatggatgaaatgtgtgtattcataattataaagaattcctacaaatctttcagaaaagaacagataatccaatagaaaaatgggaaaagttcttgaaaagtgaaccatggcacaaaaagggcttgtggcctgctggcaatattctgtatcttgacctggatggcatttttaaggtgatcactttatagtaaataactaatgtgttttatgcatcatagtaacgttaagatttttgtcatctttacaaaataagaaatccaaacggccaataaatatataaagaatttctaagtcccattaatggtccaggccatgcaaattaaaactaaaatgaaatatcactgcttaccaaccagaatcattgaaatttataagtctgacaattccatgtggtggtgagaatatacagcaattagaaatttcacacaatgttacttggtctgtgaattgtaaatagaagtgtaaaattacactactgcttcttggagtgaaatccatttggcactatttagtaaattcaaagatctgcataacctatagcccaccaatttcacttctatatatacactctacagaaatgcatatgttcatattccaggagacatgtttgggaatgtcatagcagcatagtaatagccccaaaccaaaactacttcagtatttattaatagtaaaatttgctatagtttgaatgtgtctctttccaaattcaggtgtcgataatgtgctagtactaagaggtagggtgtttaagtggtgattaggccatgagggctccttctttgttaataaaaataagacccttataaacaaggcttcacgcagcattcagtcagcttgctctcttgcccttctaccttctgccttgtgaagatacagcaggaaggccctcaccagacaccaaatgccagagcctttatcttggacttcccagcctccagaactgtgagtgaatacattggtattatttgtaaattacccagtctcaggcattttgttataacagcacaaacagactaagacaatcatacagtgagaaattaatcaacaactaataagcaaagaggtagattaatcttgaaactatgatatagagtgttccatttggctgctggaagttttatttcttggtctgggtgatggtcaccatgggtttatatgaatggttccctatattatgtttcacaacaaaaagcatttaaaaagtaaatatatgtaatgtactcagggataggcatggccaaccatggattctatgctgaaataatgattcagatttcatcagcaggctaatgacactgcctatttaaatactttaagtcctgaaattaaagaaggtaatttctcaagaaggaatttctaatttatgggtgggtctattccccaccagagagacactagcatggctcagattctatgttggtcattttatttgcatttaaagtcttaagccaaatagaggtacactaataatgacaacaactactactactcatacttgtggaacactgccagatgctgttttaagaaatttgcattttcatttgtaactgagcttacttgaatcttctctctttttttcttggttaatctaactactggtctatcaattttacttatcttttcaaagaatcaacattttgtttcattgatcttttatatttttgtttcaatttcatttagttctgctctgatctttgttatttcttttcttctggagctttgtgttggctttgttgttgattctctagttccttcaggtgtgatgttaggtagtcagactgtgaactttcaggctctttgatgtaggcatttggtgctagaaaatttcctcttagccttgcttttgctgtatcccagaggttttgaatagattttgttgtgaatgtgatgaaaacggaacatttgtacactgctggtgattgtaaattagtacaacctacatggaaaacagtatgaagatttcttaaagaactaaaagtagatctaacatttgatctggaaatctcactaccgattatgtacctagaggaagagaattcattatatcaaaaagacacttgcacgcatatgtttatagcagcacaattcacagttgcaaagatatggaaccatcctaagtgccagccgaccaatgagtggataaagaaaatgtggcatatattttcatataccgtgaaatactattcagccacataccatgcaatactactcagccgtagaaaataatgaaataatgtcttttgcagcaactttgatggagctggatgccattattctaagtgaagtaattcaggaatggaaaaccaaatactgtatgttctcacttataagtgggagctacgctgtaggtacacaaaggcagacagagtggtagaatggactttgaagactcagaaggggcagagtgggaaggtagtgagggataaaaaattacctttggggtgtaatgtacactacttgggtgacacgtgcactaaaatatctgattttacttctatacaattcattcatgtaaccaaaaatcacttgtattccaaagactattgaatttgaattttttaaaaacattaataaaataaaagatgtaaaaaaagaaatttatatatactcatttattgagctcccacaattaaccttaggaggtaagtacttcataattggtagtatacttatcttttactaaatatttgtattacttgggaagttgagggttggggagaagtagcaaggtactatgatttggggcagataactaacttatttattcgcacatacagtttggaccatgagacacgagctcaggtccctcctcctcacctaatcaaagatgaaatatgtgggatgggatgaaataatcagcagtccaatgctgagtttccagaccgaagtataaagcaacaatggatatgtcagaagtctactagggtgttatttatttaaatctatttcatggaatttactaccaccttaatggcccgaaagtgttaaagtatgccccagagtaccgaattactccctaaatgtaatttatgcttgagaataatctgactaacttgatttagaacatcagaaaataagttatgctgcacataaatgaagcagcagtgtaattttaaataccggttgcacggtgaatgagaattttaatatttgcaaaattctaaaatcacttgatttattatccttatgtttatactgacatttttttgccctttgttaagttccatccatatttcttcttactgccaagaaaaaaaactttttttcctagaaatattacagaaggcaaaaattatatttgtttccctgaatgctatttttgatgtctctacttgtttctcattgttaccatttgcttcattcatgggcagcccaattaatggagcgagacaaatttagggagcacagtgactaattagatattaaattggtaaatctaactttgtaaaaccagaaaaaatatatatatatttttttcatttggaattttccttggtggaaaagagtttaaaagtagtcatgataaaaaatgtaattttacgtagtaaattcaagaatagatttagactgtgctattaacagcacctattaaatactgaaaagtgtattttaaaattttatgtgaggcttgaaatggagtctaaagtattattactcacattaagtgtcatcacatgtaaagcccatgattttattctttaatattttgtttgaatagttacttatttcaacagtaatttcaataataaaattaaatcaactttacagttttcaaaggtttagcagttgcatgctgtaataaatacttcatatttatatatttataaagtgacagcataagtcatttttattaggtccttgaggatgcaaaagtttggattatacgaggagacgagagaaaaagggaagaagggcatttcagaaatatgctaccgatatgcaaattcacaagtcctaagacagtagcaggggtcgggcagaaagtccatcctgcctccctcttgtgggcctggaacaatggtgtaagtggaaggcctgttccccttctcttcctacctccagctctgtcttacagagctacggataccatgagcaagtgtatgaacccttacggttttcttctcttgggagaatgtaaaggaaagataacttgtagaaacttgtagataacttgtaaaaaggaaaagaattcagggtgagagggggatttgttgaatttgatagaggatggcaattaccaatatgatgagtgattgagaaacaagtctgtgcaacaggtttgaaatcgaaaatctttgaggtgtacaggatcctgaaatgaagaatgggcatttatagcagtatgtcagagaaacagtcacctcctagtagctaaaagtgttggcaaaagtatagttcaagtgattgggtaggaaaaacagcaaaccaagagtggagactgatggttgctacaaaggtggagtggtaagtcgtgaccaactggtacttctctgtgctctggttagctgctgactgtttctcagactgtggtagcaggaggagggttggagttagcagtcatttgcatatgagactgccatttaaaaaaaaattttaaattatttcatttttctgactctcaatatgaaaagcacattgtagacaaattgaaaaatatagaaaaattatataagaaaatatagtctcaccagtatggaacaatgctaactatgttgcatagatttttagattctcattcaaaagcaactctttgactccagtgatgcaaatgcatgtaacatatgcaatgtgcaattcatttttaaagggaataaacttacgatatattcataggtcatttattgtgtgttatataccattgaaaatatatgaatgctaaattattagtaaacatgcaaaaacattggcaagatcattttgttgtggaaggatatattgtatctgaataactctagaataccataaatcatcaaaggcaacattcttatttttcactaactacagttagagaatacctcttcggctaccttcggttgccttttttatgctaccaaaatgctgtctgttttacaagattttaaaggttaagcatataattattcattaaatacaatgagtgcaatgtacatgtagatacattattaaattttgggtagttaataaaaataaggggaaaaaacctctagaactatcacttttaattgtttaactgataaagtgaagcttcatcttggaaaaataatttcacaagagagcatgtgcactggtagaaaagtgccattgaaacaagagatatttgggttagaagcctctctctactatttaataccattttcaccttttggcaaattacttggcctctgttttctccaatggaaaatgggaataataattgttatgctgcagggttattgtaggtgtcaatgaaatgatgtgtctggcactataaaagcacagagcccggtgcctggctattagtaactgtttaataaatgttaattcctttctctgcccaggacatcagtaggcagatgtagcaatttaaaacttctagtgttactttaaattcctgaatgaaggtagaggactgaaaagatatcatggtattcaaaagtatgatccattgcttcttaagaatagagttcagaaaagcttgacagattcctgtactctgaggcagcaccatagccggtaatctgtaggatggctattggttttgtgctcacaaatgcttgcttgggcaggccccaggaaatctggtagactgtaagcccagtaagatttcaaatcttactttacggcagtgtttttcaccttgactgtacattgaaatcacctggatgctttgaaaaataacagcgtcagtgtccaacctccagaaatactgattaagttggtctggaatggagccccaggatcactgtttggttattgttgttgctgtgttttaaatgccccagttgattcttatgtgcaactgtcttaggtaaacatacagccctggttcatattatttctgcctcagtctcttttatgactggaaggtgaccaaatgcttgtttcctaatattctttccatgtgtagtattaacacatttgacttgtactaagttcctgcagtattccaatctaaaattttagtgactacaataaaataagaaggattaaagaaggcatcgcatagtttagtatatcggttatttaatgcttacatgtgagcctacaatatgaattatatctgtcatcttattttaaatattgacagaatctttaatgatagtgacgaattattgatttattggtgtgataatggtattttagttatatttttaaagttttatttgtaataactatatgtatttatggggtacagtgtgacgtttcagtgtaatgtttcattgtgtaatgatcaaatcaggtttcttggcagatccatagcctcaaacatttataatttctctgtggtgagaaaatttaaaattctctttcactattttgaaatatacagcacaatattggtaactttgttcatattactatgcaatagaacactagaacttattactcctttcagttgatgaacaggcagttttggatcaagaataatattgaaagtgatagaatttatgaagtaatttttatccaaaaatattttgaaagggaatatattgcttccaaataatttattacaatgttaagatatttgtaaatttctagaattaaaaaaatatatttttaggaaagaaaatgccaatagtccaaaatagttgctttatctttcttttaatcaataaatatattcattttaaagggaaaaattgcaaccttccatttaaaatcagcttttatattgagtatttttttaaaatgttgtgtgtacatgctaggtgtgtatattaatttttatttgttacttgaaactaaactctgcaaatgcaggaaactatcagagtgatatctttgtcagtataaccaaaaaatatacgctatatctctataatctgttttacataatccatctatttttcttgatccatatgcttttacctgcaggcgatttgacagatctgttgagaaatggcggcgttttcattatgatataaagatatttaatcagtggctaacagaagctgaacagtttctcagaaagacacaaattcctgagaattgggaacatgctaaatacaaatggtatcttaaggtaagtctttgatttgttttttcgaaattgtatttatcttcagcacatctggactctttaacttcttaaagatcaggttctgaagggtgatggaaattacttttgactgttgttgtcatcattatattactagaaagaaaattatcataatgataatattagagcacggtgctatggactttttgtgtcaggatgagagagtttgcctggacggagctggtttatctgataaactgcaaaatataattgaatctgtgacagagggaagcatcgtaacagcaaggtgttttgtggctttggggcagtgtgtatttcggctttatgttggaacctttccagaaggagaacttgtggcatacttagctaaaatgaagttgctagaaatatccatcatgataaaattacagttctgttttcctaaagacaattttgtagtgctgtagcaatatttctatatattctattgacaaaatgccttctgaaatagtccagaggccaaaacaatgcagagttaattgttggtacttattgacattttatggtttatgttaatagggaaacagcatatggatgataaccagtgtgtagtttaatttcaacttgtggtgtcctttgaatatgcaggtaaagatagattagattgtccaggatataatttggttgctaaattacatagtttaggcataagaaacactgtgtttattacacgaagacttaattatttttgcatcttttttagctcaaattgttcatgttgcaatagtcaatcaagtggatttgaattgtagccaatttttaatgccagaaaatactgattaagacagatgagggcaaaaaacacccagtagtttattaaatactttagatatttcaaaatgctggattcacaaaagcagtatcacatttgactttacaagtcttcattctcaaatatgtttccatagtaaatatgccctttaatattaaggagttaagcatttaaacacctatttatatgataagctatttaaacacagaaaatatttttaaaaccttgtgtaattatatgtgtatcaatcaaacttgcatgcacaccagcgttggcatttgtatagagaggaaatgtatggattcccaatctgctttaatatagaagatacattttaaaaatagcactgaagtgaattttgggctaatgtagcataatggggtttctgcctgagaggcagaaacatattagagttatataaaatgttttggggtagatatagaaaccacttgccattttcaatgatatccaacccaaggtagttatatatttcaatttatattttattatcaaattagtacttattgtgaaaaaaatcaagtaacatagaaatttgtaaaagtacctccattctactctttggaggatagttgttcagtatgaattttgctacatatttcaggctgggtttcttggaaagccattgtaaaatggagatttgtatgtagaaggttaactagggagtacttttacgatgaagcaatttgttttgatgtaacttggtgtagttttcttcatgtttcttgttcttgaagtcagttaagctcttgaatctgtgcatttaacatttcatcaaatttagaaacctttcaaccatttttttaaaaaaaatggaactccaattgtacatttattaggctccttaaagtgccccactactcactgatgttatgttcattgtctgtttggtctctcttttctctgtaatttgttttatataatctctattgtcaaattgactaatctttttcaaagtctaatctatggctaatcccatgtagtatatatttttaacatcagacattttcatctcttagaagtaaaagttgggtctttttatttcttccatgtgtctactcaacatgttcagtctttactttcttgactatatggaatacagatataataactgttagaatattcttctctactaattttatcatctgtgtctattctgggttaatttaaattgatttatttttctcctcattaagtgtgttgtttaactgcttctttggatgactggtaatttttgactatatgccagacattgtgaattttaacttagcgcgtgcttgatacttcaaataaattcaaatatattgaaataaatattctcaaacctcgttctggaacacagttaattcacttggaaacaatttgatcttttgagaatcttccttttatgctttgttatgaccagaacagtgtaagtttagggctactttttccccactactgaggcaaaacccttctgagtactctctctgatgtcctgtgaatgataaaatttttcactggggctcgtgggaacaggtggtattactagccacgtgtgagctctggtgattgtttcctttaattcttttgtgaagttctttccttagctttgagtggttttcttgcatacatgaactgatcaagactcagatgaagaataaaataaagctttctacaaatctccaaaatttcctctgtgtatatatcacctctctggtattttgccctgtgatcactagtcagccttgggctgctgaaactctcagcttcatcttttaacaaaagcctcctggcaaggatcactgtccttcaatgtctgatgttcaatgtgttgaaaaccgttgtagcatatattttgtctttttttttttttttttttttttaagtgtttcaggtgtttcaggcaggagattaagttcagcctcctttactccaacttgaaaacaagtccaaaacaaactattttgatgtaatttgatcttttaatacattaacattacacaattttgtgaatatatcataatttaaaattttcagagaatgtctaatggtcctcatttcttgacagtgtggtttagttgaaactgatgaacattttatcaaaacttttcccctcaattggatacttttttttttttgagatggaattttgcttttgtcacccaggctggagtggcatgatctcagctcactgcaacctctgcctccaggcttcaagcaattctcctgccttagcctcccgagtagctgggattacaggtgcccacccccacacctggctaatttttgtatttttagtagagacgagatttcaccatgttggtcaggctggtctagatctccgacctcaggtggtctgcctgtctcagcctcccaaagtgctgggattgcagacgtgagccaccatgcctggccaactggataattttaaaaagaccattttatttagtctattttttctcaatctatagatgagataagaaaaatcattctagatgtccaaggaaaaattctttcagaaaagagctgtgaatgatatcacaaaccccccaaacagttaaggtatttctttcctggttattttatgtccaaaatcatgcatatgaacatgtgcacacacatgagcgtgcacacacacatgaatacatatacacgcacataatgtaccttaggttatctttccattctgagtaattatcgtaaaatgggtaaaatcaaccccgtaagataccttcatcgataaggcaaatcaaagctttggtaatttctgctatcttggcctttgttgattgactaataatgaataagagaatgagtttcaatatttactatgaaattattttagaagacaggatgtagacagtggctgttagcaggcaattgtttggcatgagccagtaatggttactgtgaaaaaaatcaaccaagcagcccatatattaaacaaacacacgcagaagcacgttggagtctgaagcctcatatgtacaattttcagtaaagaaataacttttagatatgaaataaacaaatagatatatgttgtaaacttgtccctatgtattttgatcaaattgcatcatatttttttcactttaaagaagagaatttagtgctttaactgagacttagtgttatcattcaaaatatactgactgccaatagcagtagaaagataatctggttccatgcaactctattttttttcctctgtcgcaagtaaaagacaaaattaagtacatgaattagtgctttttgaagatattccagagcaatataccatgccactatggagaacctctctaaaaatatcccatttttttacctgagaaaaatattgatcatgttatatgccactcaaattggtttattaaattcgttgaatgatatcagcatctcttaatgcattcactaaacaagcagtaattgagtgcatatacaaagttttatcatccaccaaaacagtgacaatccacatgaggctctaatagaagtttagaaagggggttaagtggttaaatgctggactcagaaagattggattcaaatcccaggtcctttagcttaatagttgtagaatcttgtgaaaatatcttaattcttttcatgtctctgatttctcttctctaaaatggaaatataaatgagatgtgtataaagccacttggaatagcattttgcacaaaataattactcattaaatgtaagcccctattataactaatcactctttataagtgattagttcatatcaatacaaactaagacttatttactgaattatcgtctctaaacatccacactgcagaaaaaccaacctggaaatttcataaaaccttatttttatgtagtataatttcttctcaaagcataagggctcttggattaggaattgaggaaaattccaattcagccaaacgcatctgtttcagatagctgacacttctgcctactcatttcctagctaacaagaagaaatgttaatgggagttttcaaaggaaaagctgaacaccatgaaggaaagtgacacaaataatgttagctcatatattgacagggtgaatttgtgtgctttcaagtcccttcagtgaaaataggaaagtagaaattataaaatgccctaacatttaaagctagcatgttcttggagactaggaaaaaataagttttaaaacatgggctatgatagaatgagatggaaaatgtttgtagttgccagtagaaacaataacaattaccattagattaagtatttaaaccagctgaatatttttattaatggaaatggcatctgttttatgaaataatgctgctgaatgaaccatattaaaaatgaccagtatttcctgcagaacgttgtcgcagacatacaagcctgagaccctaaaatcttaaggtattccatttgaaatcgaccttaagacattaacagtagtggtattgtttagatgaaattttttaggctttaaatcaacaaatgttaagcagacatggggagcgaaacaccagtgtgttattctgacatgaataaactgctgtttttagggaaaaaatatagtcttgttaaggttaagctaattggttttctggtatcttttgcaatgttagtgtgttttactgctccataacctatgttatatggtaaatgtgcaatatatttatatatgttgctgtaaagaaatgtaataaaaaactgtttactttgtgatatgaaagtaaaaatttattcattgtcattgagcatacagaagtaaatatggattacatatgtcatattttaatgttcacatggtcccaccatcaaatgttgaaaaacttatagtttaacgtcatattctattgaagaaaaatacactcccttttctcaaatgtgaaatgtccagagagaatggaaaattacatataaagcatgtagttatagcatggtgaccctgctgtgatctctcagatgaggaacaaaagggagaaagaaagagcacactggtgctttggagttgagagaaggcaaaaaaagagtacaaaaatgtcaaagccaagtttagctgctcttcagctctccctttagctgctcttcagctttaccttaccatggttattagtgattgaagaaaattctaaagcactttttaaaggacccaattctgaagagtttagattcagagagcacaatggagttggagtgactcctgctcaaaagtttgagacaagcgagtccatgaaaagaccgtcctcctcttaatggaaatacccaggttttctcattcttctcgccttgctttcagcactcgcagcccagaaagcccttatctaacaggtactgccgttgaaaggtcattgacttgtacaaaaatgatgagtgctgaatagatgtgcataggtcactgacagtatctgctacagagaatgagttttcgtatttttattaggatacacctaacatggcaatctactgcctcaaagaactctataggaggtaagtgaatttatattaatacagattgaattaaaggataatctagaaaaaggcatatgatgtaaaaaaatcagacacaagtatattttctgtatagtcagtttttacattgtgatttcaccagctggctgctgagtttgacggcttcttaacagccacactgctgagattcaaatgctgatagaaactttgatggaaaaatcactggagtaaatatttctaccatctgttgcccttcactgggaccctaacgttaagaataattcataccattgcttgtcctttatatttccccagcagtaataaaatttcataagattttgttttgtggtcacaaagctatcctggtttctgtaactagaagacatacactagcataagggaatcagccggaaaatttactgctaagagaatttgtctctagtcacttactttaaggttacagcaatgtgtaagtgtgggaatacattttaaaatgagcttttcaaagttattagctggtagtggcatgagagttaagtctcttaatacagttaaacagttgggcacttcatccttgcgtaaatattgttacccttttattgctgcttggaaactcctctgcaactttttggcccctatccatcttttcagaagtagtaaataaccaatttactgggagtgtggtaccaggcagaaattccgagaggggctttcaatccttgcccatcaagtgtatctttcagaaataagtatattaaaataattggataatttcagtggcttgttattagacttccgttgtccagcatggcatgtttaagaagatgacagattttcatacattattggaaagaagcaagaacaaaaaaacataacttactgtagtaaccacggtaaagaactgcttaaaatgcaggataaacatgtcatccctaagggattcccattcttagagcatgaaattatcaagagagtaagagactacaaaaaatgagaagaatgctgattgcaaattccaaatagaaaaaatcaaaacaaaactgcgcaccatcattctggaagcaatgagaagcagaaattgtcatttaatgaaatgtaagattaaagttaatagaagtaattttcatgaaataatattttgcaaggacgatgttccagccatattgatcttcgtgttttcttttcacatcccttcttactgttccctagaatgcttgtttctacctttaaatttgcttttctctctaccagagggctctaccctatctccagtttctcaccatgtcccaatctactccctctcagaatttttgtacacttccctttatatatatttgtgctctaattttatattcacagatatgccttttgtaactcccccatcttaaagaaagcacacacgtacgcacacatgcacacacacaaaattgaactctttctgggagatctgcttaactttcttcataactctgtcacttgctgaaactgtagtatgtgttttcatgtttattatcttttccattagaatgaacatattttgggtacttggtctttctcgatcaccaatatacctcggtacgtagaaaaattgattcatatattgaaaatgtaatattcagtagaacgaataaatacataaataaatttaaaaatgatacttttattgtattacctgagacaaatgatccccaagtttgtccttgcttttcatagccaaaacattctctcttacattgagcttccttcacctcttctgtgtacagagcacttaaaattttcacattgcctgatactttaacaatatgatggccctgttctcttacccattggagcatatgttaaataccagaacccatgtaacaaacatatattgtgatcctactgtgtgcaaagcagatactgcttgctgctaggaatacagagctgactaagagctccttttctctttatgagctcacagtctcatgagttcaacgtcttaaggcacaacgtctaaagcaaagggcagtaagtaaacactccagaaagtactggatctggcctaggacaaatggtgggttgtttttccagctgttatttttcctgccccctaattgacagtcctccattacacctctgggatacctagtctgacttgggaaaacctgactttgggaatcagaggcagtctctcttgcttatatatgaggaactctaatggatacttactgtcattagagaaactctgcttctagcctggctccttttgtaaagaaggttgagtccccttggagagcctgcagaacataaccatttgcatgtaatgaacagtttgtaatactttgagattgatgtgcaatttctatttgacaagggaaaaacaattaggattaaccgtggtcgtatatcccagaataccaacgttgtttccacactctaagtgttgttgggtcattatatgagattcataattttgtcctgttgtacccacgtttgcattaccattcagtcttaatttattataccctattaaaagtttttttggtaatttgttcttattgctactcaggcattaaaatgtctgcaggctgtgaaaatgaataaatttaatgtggcagcatagttctcaaaatcctggctttacaactcatagtacaggcttgtattgtaaatcctagttaacatggatttatttgaaaatccaattttactgctaatcttaaataacacatttttcaaacattttatccttgaatttctatttttttataatttatggctgttgtatgtatttacaaaaggacaatgtgtgtacttttaaatactagtaatggattgctgaaacaactgtaactttaaaacaatgcaattgttaaaaaaataaactgtgcagcctggcttaatggaggcttatgaacatatgattaagatatatgctataataagcaaattcactcaactgatagttcataggaactttcaaatttaatctcataaccagtgctatccttcaaagaatggtcagggcaatttaacgagtacatgaccacgcaagataatttcattgaagagtggctgaactgttgaaatattttctagtctccttgggatatcattaagagcagaaattttgaaatggaattgtaatgatgttcagaaaagataagtaggtaactctcttaatacgttttgtgctgctgtaacaaagtacctaagactaggtaataatttgtaatgaacaaaaatgtattggctcacagttctggagactaggaagtctaacattaaggtgtcagcctctggcgagggcctacttgatatgtcatcacatgatggacgattagagggcaagaaagatcaaaagggggctgaactcccacttttataagggaaccaaacccactcgtgagggtggagccctcaatccttaatcacctcctaaagctcccaccccttaatactgtcacaatggcaattaaatttcaacatcagttttggagggaaaaacattgaaaccatagtagtgatactgactactaccacacagggcttgggaggctaccctagctgttgcacccaagagatgaatcttctaatgtgattacctttatcattttttttactttattaaaatacttttattttacatgtatacttttgtctacccaccatttccatgtctgaccactgctactactatgtcctagcataacattccatacatccttaaaaccaagcaaagggtggagttccatctttaaaaactaaacaggcattttggacaacacattcttggcaatggaatctggacaacatttatcaaacatggtagggaaggttctcactctgcattatcaaaacgacagccagatatcaactgttacagaaacgaaatcagatggaaaatttttaacaaattgtttaaactattttcttagagagacttcctccactgccagagatcttgaatagcctctggtcagtcatctggaagcaattcttcacataattcatgaacttggcttccactttaggaagagaaccacctttttctatacttgcttgcatttttgctttaatgtcttctacagaactaggtcctttgggtgttttaggagtttttccttgttttgaaggattcttgtccttttgatcttggtgttgacggttttgagtcttttccattccgatttgacttttgtgcatttttggctggagtatctcatatagatttcttcactggcgctttttcttcagtttcctcatcatcaaaatcatcatcatcatcaaaatcatcatcttcatcagcagcaagttttacttttttctgtggaaccttgctaccacctccaggagcagatcgctttccagatatacttatgagtttcacatcctcctcctgttcgtcttctgactctgtatcttcctccccagctactaaatgctgtccactcacatgcactggccctgaaccacacttcaaccgtaagaccactgatggtgttatttcaaagccctcaagggaaaccatgggctgtacagacattttcaaagctgccagtgttactttaattggactgcctttgtaactcattgcctctgcttcaacaatgtgcaatttatcctttgccccagcccctaaactgaccgttcttaaagataactgttgctcaatttcattattatccaccttaaagtgatcatctttgtcggcctttagttcacaaccaaaaagatagttttggggcctcagaggactcatgtccatcatcgtccatcaggtggcaggacgcacttaggtgggagagaaggcagatgatgataaaggaccactgctcaagagaacagctgtgcaggacagaatcacaccagggagattacctttatcttagaaaacctgaacatcttgtgtactttgacacttctctacatttcacctaacctttaacatcaacacatttattcagaaaacttttacttttggagctgctctgtgtcaggctctatgctaggtgctcaggatattgaaattgatacaatcctaacctattcacatataatccaaggtttgctgaaattgatggacatttaaacaattgaaacatttaagtggtataattagcaaatggacatttaagccataaaaatagcatctaatagatataatagaggtcggtacaccattgatgagtcagagcagaggcaacccaaagagtaactagccagaagaattgggaaagcttcatagagagagcgatatgaaaataagggagagaattgtaaatccatgaaaatgagaaaaagttgaaaagtgatggtgtcagaaaaacttgtggtatgataatgacaagatgagaggaactcttggtaagcgtgttggatgcatggaaagaaatggcacaaaataatgctgaggacattttttattttattgttggttttgttttggttaatttcattttttaaatctagtatgctagtgttcattgtccaaactgtgaatcataaactcagtttgtggatcaacaccggcctttgatttttagtgaaacaaaatagaaaatatcagcattcatcacaaatagatgtttcacagattttttgttttaattgcgactgtgtgtgtgtgggtgtgtgtgtgtgtgtgtgtgtgtgtgtgtgtatgtgagagagagagagagagagagagagagagatggcttggatgtttatcacctccgaatcttatattgaaatgtgatttccaatgttggaggcagggcctggtaggtgtgattggatcatgtgggtggatccttcatgaatgatccctttggtgacaagttagttcatgctatatgtggttgtttaaaagagtatgagacctcaacccccacctgtttcctgctctcccctttgccttccaccatggttggttgtaaacttcctgaggctctcaccagaagtagatgccagtgacatgcttcctgtacagcctgcagaaccgtaagtcaaaagaaaaccccttttctttttaaagcacccagtttcaggtatttctttatagcaatgcaagaagggactaacacagttgtatgtgtatgtgtgtgttgggtgatttctggttgagtgtcacaaggttgtaatatggtgagtgtaaggaagtataagttttagaaaattaagaagccagttcagaaaactaatacttttggaaaatagtacaaaatcaactttacaagaatatacacagaaagatgtaatacaagatttatttcattgcagtaatttataaagttggtttagtgccttgcttttgcatgctgttttaaaaattaccaagaatatgacttcatgtgattttgaaatactcccagcaagataggtagaaaaggtattcttataactcttagacaaaaatttcggaaagtttaaacgctttatcccaaatcataaagctaataaatgaagaatctgggattcaaacaccatattttttttactgttcatcagctagaagttagaaatgttaagccaaaaacattaagtcactgctctgcctaataaatcttgaggaaactaataaaaagaataataccactgactacaggacaaggtcttcctaagagaccttaaatatattaagtgatgaagatgaaacttcttttattcataaaaatgttatttagttatgagtagagctctaattaaacttattttatattgtcatcagtaaagttgagacataacatatttattaatataattataatttgacccatagtgtattaaaagaaggatgttaaaaggagttgttattagagatgatgttagggttgttgatgataataacagtagtcataacataacaaagcacttcataatttaagaagtgccttcaattacattgttactctcatggtaatctctgtttgatatatagatttggcggattctatatcactctaagacataggttactgaggtgacggaggaatttagcaagcggctgtcaaatggaggacatgagcattggattgtgtatggcaagggctgatggtctctaagaaagcctcttggtttccacagggcagaagccctttgaagatcatagccaaggatttagtaattgcctccctttcagaataccctcaagagaaaagcccaccataagacatggttccctacaggcaaaactgcttttccttaaaatttactgttccctgaatatcagccttctttggctcattcaacatagttttcttaagtttcaggacagtgctgcagaccaaaagtttcaacattgaggaaaacaatactacttgtgcagtgaccctacctcagtcagggaggcagatgcctgcctttatgtgagggaataaggaatcaatcatatttccagcactcaagaaagccagtctagtgcagggagagatagatacataaacctcaaagttatgatatagcataatagttttaaatttccataataactgtattttaaaagttttatagaaacagaagagatgacctcagtctggaaaagccagcttggagaatggcaaccaatattaagtggcaaaagctttgggatcccaggcctccagatggagggtgatagcatgggccagacaggtaggttaggaaaactttgcaaaggacattacacggtacacagacaagtctgtgttttagcctataaaccacagttgcagaatgtgtttgagcaaaggcttttggggatgagatttgcacttttcaagatttaagtttgtttaggatacttacggtttgctgtatacttcctgggtttttacattataattacggtttgaactttaaaggaaaactgcagtttagcatacttgaaagagtgcaacttcaagtcatgattggagacagatatttaacagattttgtgatcctgtgatgcttattttcttctcagacataccacatgacaatcatttttaaacagtttatttctactttagcatccatctgaaggtgttgtgtatgttttctgcttgaaaataaagcagtgggctgggtgcggtggctcacgcctgtaatcccagcactttgggaggccgaggcaggcagatcactaggtcaagaaatcgagaccatcctggccaacatggcgaaaccccatctctactaaaaatatgaaaattagccaggcgtggtggtgcatgcctagagtcccagctacttgggaggctgaggcaggagtatcgcttgaacccgagaggcggaggtcgcagtgagccaagatcgtgccactgcactccagcctggcgacagagtgagactctgtctcaaaagaaataaaaaagaaaataaagcagtgaatgcgattaagatggatttattatgatcataaagtactcaggagtcttattttaaaagacagcattactgtaattaaaaatatagggaagaaactaatgctgttttgcgtatcattctcagctctctcaaaatcagatattaagctcttgctgccaaaggagactatactgcacggtgctcacctgcataaactttgagagggttgaattgtgccaagcaattctctcaatacataaattaaccaaatatttgttgacctactgtgtgacaagtattattccaggaaataagagatccagcaatgaaacaagtatggcttcttatagagttcccaaaaaggaaataaaaggatatacgtatagtgatatccctgaattaaatttctcttttgaaaataaaaattctatcataagctgtaactgccaacacttcaatactcattcagcagttttcagggatttgtaccttttgacttatgagaatttggaagtctaattgtatcattgcactggagtcttaaagaaacagataagcgaatgactttgcctgtatcattgttgactgtacttacaatcagaaaggggcacaggacagatgccagggagtaagtggacagcccataaatggaatggtaagaaagaagaactatagtggatttggaaagttcccttcagcattttccctagacaatctttggctgtgtttgcatgatcagtatttcattcacaggatattgagctcttgatatagttctcaaaacccaaaatgaaataagaagtctactctttatttaaattcaaattccagagagttaagtaactttccaggaggtaatctaaatatggcctccttgttggggggggggggggtgtttgaatttgcatataaatagtctcacccttaaaggaaaaccacagatggtggtaatgatgtagtcataatgtacatctccacagtggtggaacaaaatatccacagttttgctttccccagtttcagtgacccatggtcaactgctgtctgaaaataggtgactacaatacaataagatattttaagagagagaaagaaagatcacattcacatgattttcattacaatgtattgttataattgttctatttttattcatgatttttaatctcttaactgcgccaaatttataaattaaaatttatcacaagtacatatagtttatatagggctcagtactatctgcagtttcagacatccactgggagtcttggaatgtatcccctacagataaggggtaaaccactgtatcctatttgtgtgaatgctacaggtgttgtgagctcataacaatatgacatcaacactgaactaatccaggatttggtagtgagagtgatgtatttgcaaggagtgagacgtggtgcctcatccaagcagagaaataattttgaaatttgcctgacaataaaaatcacaatgtgaggtctctctttagagctgcaaagtccaattcagtgccccctagccacataagatactgagctcttaaaatgcggctagtactaattgagatgggcactgagtataacacacatgccagggtttgaatacttagaaccaaaaaggaagtaaatgctcatttattgcatgttaaaattatggttttattatagttgattaaataaaatatataattaaattgacttcattttgcttttaaaaatgtggctatgaaaaatttcaaattatatatgtgtgtgattacatatgtgtgttttcacatatgtaactgatgttacatgtgaaattgattgttacatgtgacatgtaaaacacgttacctaacacgtgcatatgtatgcaacacatatgtaacgtgttacatatataacacgttacatatgtattgttacatgtgtgcttgcattacacacatgcataatatgaaattacatgtaatttcaaattacatgtgtatattttgaaaattacaaattacgtattttgttatttttgctttacaaagtcaaatttaccctatttaataaagcatcatgagttttttataactagtaaactttgagacttttgtaggagaataaataatgcttattataaaaactgattggaaaagtgagctggagcagggagcggaggaaaaaggactagagatcacctttcttcccagctccgctcctctcccaaccttttttctttccattctctcatcccaattcaaaagtgcagagttcacagttggtgtgctgatttagaaaacagatatataaacagccttaaattttctccaggcttttacaatgaaaagaagttcaatatcaaaagtaacaatataatctgtggaaaggtatagggggctatgtttttgaggtagaaactataggtgctcctggccaagcatggtggttcaagcctgtaatcccagcactttgggaagctggggcgagagtattgcttgagcccagaagtttgagtctagcctggcctacagggtgaaactccacctctactaaaaatacacacacacacacacacacacacacacacacacacacacacacacaaaagccttgcgtggtggcgcttgctgatagtcccagctactcaggaggctgaggcgggaagattgcttgaacctgggagacagaggttgcagtgagctgagatagcaccactgcactccgacctgggtgacagagtaagactgtctcaaaaaaaaaagaaaagaaagaaagtataggcactccttatatgcagctgctcacacccctcctccttcacacccctcccccttcacacccctcccccttccccaaaatttgcaaggggaaaaatgtgtgtaattggcagtatttagtggcgtgcaaccgtgagtcatcagactgcacatcctcacttctgctagtggctcagtacccaacagcactcagtgaaaactaactcatttcaaaggtgaaaacaagtgagtttggccaccagggagtgttcaaaactgtcagtgctgaagcaaatgtggagggtgttctgtagtttgttcaggttgatatttgtggtccaacccctagctgaactactaattattaatatctgtcttgatggtgcctcaggagaaagcttctcaaagggaatcaatgttcaaattatagtaggtatcttggccatggaagttattgaattttagccaatacttgctactctttcatttatagtgtgagaatgcagtgtaatgaacctgactctcactgtcctgacttgcctttctcatcgcattcacaataagcacgtcaatacgtatacacatttcatatttctaaagtttactttatttccttattgtacatcgctgtgctgctgatggaagagaaaaggaaaaacactattgattgcaaaactgttttatctttggtggcttagattttttttgtatgatatgtaacgtcttgcatacctaaggcaacacgaagctaaatagatttgcatatagcatgtattttttccaattaaatgtttaattttgttcagagtatactggggacattttgaataatggagaaaagtacaaagaaaattcataattctaccacctatcagcacagtgaaattttatgaagaaacataattttcatgtaaatcatagtgaactcacggtaggttttatttaatacagtaattggagagctggtaggaagacaaaactggttcaaaagagaatacaagaaacaaatgcttctataatgagtgaatttttaaaaaagtattctggaataagattagtgaataagatactaaactcgttgataccctacagcctttggggttatatcctctactgggtaaaaagtcatttacatcatatcagttttctaaaatttgcattgaacttcatagcgttgtaacatgtgtgggcccaaattaatagtaaacagtaagagttgctttactctgaaaatattgaagctcttgtgagggtgtgaggagtttgttagaaaacaacgctaccattattttgaaacacacacgatcatcttttgttttacttctaagttttggataatttttcttaaattatcttattatcttatccattttcttaatttccttaaccttttaaatgtttctcctaggcacttttattgatttttggaatatagttgatatgtgctgaatttttatcatccagttttaattctactgaaaaatctaaaagatgttcatcaactactatatttcaaatgcatacatcccctttcatgctaaagaaactgtatgggaaacacagtctgacattttcaggacctggtatcattaaaagtcttgacactgttaaaattaaacaacgccttttttaaaatcaaaggatacaaaagggctgtgttggtcagaggatacaaaatttcagttagataggagacataagttcatgagatcttttgtacgacatagtgactataattaataataatatgttttcgaaaattactaagagagtcgattttaagtgttctcaccgcaaaaaaatagtatgtgaggtaatgcatatgttaattagctcattttagctagtccacatttttcaatacaatgtgttgtataatacgtgatatatacaacttatattttccaattccaataagtaaaaataaatgtaaattatttgaaataaataaaatgtgaagaacatccacttttcatatgaaaccatgagatattttctgttaaaagattaaatgtccaataaatttttgatgttaacagaaacaaaaatgtttaatatttaaatacatatttgcatgctattgaccccctgaagttcactgctgggctaagtgaaccaactatatcttaagtcaaaaatgctgaaattcttccccaaatcccaaagctcatgaaaacataaacagaaaatttccaaataattctacagggaaaataagacacactatttgatctgatcaaacaacgggatgattatggttaataatgagttacttgtacatttaaaaataactaaaggagtgtgattggattgtttgtaacacaaaggagaaatgcttgaagggatggataccccgttctccatgatgtgattattacccattgcctgcctgtgtcaaaacatctcatgtaccctacaaatatatactcctacgatgtacccacaaaaattaaaataaaaaagagagggacccgaagataagctaatatttaagctcatcatacttattaagataagcaatacataccgaaagtaatagcatttaaaaccagatgttgggggagggttctaacttgttcattaaaattcaaagtcacctgtcttgttttttcttttgtttttgtttttttttttttttttttgagatggagtctcgctctgtcaccccaggctggagtacagtggcgcgatcttggctcactgcaagctctgcctcccgggtttacgccattctcctgcctcagcctcccgagtagctggtactacaggcgctggctaccacgccccgctaatttttttgtatttttagtagagacggggtttcaccgtgttagccaggatggtctcgatctcctgacctcgtgatctgcccaccttggcctcccaaagtgctgggattacaggcgtgagccaccgtgccaggccacctgtcttgttttatcatgatcccgagagtatatatgtatgtgtacagctcatctaaaccctttttctttcaacatgatcaatagattgaacattggagatattttataagaaataatgaagacaactcaatcagcacatatatatattaaatgtggaatctataatgattgcgaagcctgaagcaaactaaatattcagtaataggttctttttttccatggtatatccatttgaatatataacataaatgccttacatttgttttaactatttaaggtttatgttgttagtgtgatgaaatggctggcaaaagtcagaaactcaggaaagtttcaggcttatatctggagcctggttttctttcttcaaggtagaacctctgtgaagtgaaaaattttttttatatctggagcaataatgtagaagcttaaatgtattatccaagttgtcataagcctattatttctttacattactgaagtgaaagacagcattaatggctaaatgccatacttggctataatttatattgtttaggactggaaatgagcctgaaatgtacatttttttccaaaatagttcatgtaatatttgaaacctgacaagtaacctgatgatttcatggaataccatcaaatataaatgtgaagttttaaagacacagggaaatactcagaataaaccccctaaccacaggccagcagaagaactagacttgagaaaatgaatgggaagatagatagtaacaaatgacttctttggcagccttatatatgcttagtcttatagactgttttatggatgctctgcactctatttccagcaagtatggcatttggaacaggaccacacgagacaaactatgagttcacatttcccacaactgcacagatagaaagagggaacaacagaatactccctttcttcttgaaacaataacttctgttgaagctcactggcttcttttcagctgtttctgctagctcctcctccgcctcttgacctctaaggcaatgctcttcaaaatttcaagactgctttctaattgaaacaaaacttataagcacatttcttcccacaaaatgtacatttatttgtaaatcatatatgaatatgactaagcatgtaaacgtatgtgaaaatagaaatcaataaatataaatgcaaacacaaatagaagcattcacagttttcttttgtgtcccagtgagttgttccaaattcctcggaggtaggtatgtcacagtttgagactataccttcaatcctagggtttctggtttcgctctcctcctaggtgatagcatccatttctacggacttaactgccatctttagttgaataactcctctatctttccatcccatatttctcttgattccaaacctgcttgttcacctgagcatatgacacaattcattggctgccgcacatgcagctttgacattttatttaaaatctttccccttccccagccctcatctatttcacagtagtatcttcttcttatctacttgattggtaagcagagtccacatgattccatcatttatctcccattttatatctaatctataagcaagtaatgcaatgcaacttctgtctccaaaaatttattttgaatttgccttctcttcctctgcatctcccccatcttaggccaggtcacctctgccctcttgccagattaggtcacattctcttactactgttgttattctcttcctattcaatcctacaccgcagcaaaatggatcttctcaaaatgtcagctagataaaggcatttctgtgcttaaggccctcatggatttatcttattaggatgaacacccaactctttattatggcttagaatacaatgaattacaacacataatgaatatattatatttctatctttaccattttcttcttaagtcaacctttctcaatccatataggataatcatattagtgcttcctcactttctaaaacatctcagggcctttgcacgtgtttctctgttcttagacccagaatgctcttccttttctctttgtgtagctaggtgcttctttccatttacgtatcacatgaaatgcagtcattccctcctccttccctcactacctcacaaaaagttgatgcctctgttaaaccatgaatggaattttactcggcagtgaatagaggaaaaaccaatggtaaaagcaaccatatgaatgaatgaatgtcaaaaatattatgctgagccaaaagtcatagacacaaatatgggtatttacatgaagttaaagcacagcaaaactcaattacggtaatagaattaagaaagtggttacctctgggtgagggttggaattgagtggacagaggcattagtgactttttcggggtaatggaaatgttgtctattttgttcaggtggtgaatacatagatacattcaattgtcaaaacacatccatccaaacacttagacttttgcactttattatatgcaaattatgcctcaactgaaaaaagtttgttttcaaaattatatcaacagttgaaattcttttaaagatttgattcaaatgagattaattctgtatccatcattgatgtatgatagttttgtatgtagttaaggttattggagataattgaaagttatactcacaagaaggctgcataatatgaagtttatctgccttgatctttaatagctttcgcgatttcaacttcttcacagctctgtaagaaggcagtgtggcatgttgaagcaagcatgtgttttagagtaacacagagctggtatacaaccccatgtctaccaattatcaatgatgtgggtatgttgctggatctcaataatcttccactgtgaaatggaatgtaacacctgactcacaacgcaaaggtatttaccttatgtaatataattcctgcgatcctgggacctcccttaatcccatccacagatgccaggttaaagaccccatcacagactagaacaagttgggatgtcaaaatgaataaatattaatcgaagggcctattgtgattgaacaccacgcagtaggcactctctaatacctaccgtctccctcctttttgggggaaacattctaaatgtgcaaaaaataaagggttatttgctttctggcacttgggatcgatttattgaggatatgttagcagaacagcaaaggtgaaacactaaaagcaccatcaatacacaggcagaggtgaagccataaagcctttattttttaaattaatgcacaatatataagaggtatgttagaatgaacgtccaatccctgaaaggatatacgaaagacattcataaaattacatgggcatgttttcttaatgttcaaaatattgttttaattagtgtattatgagtttattcatgtgtctgtgtgttgtgttatattaatcttttcttgcattgctataaagaaatacctgagactgggtaatggatgagaaaagacacttacttggctcacagttctgcaggctgtaccggaagcatagcagcatctccttctgtggaggcttcgggaagcttccagtcgtggcagaaggcagaacgggagcaggcacttcacctggctagagcaggagcaagagagacagaatgaagtaccacacacgtgtaaacagccagatctcagagaactcactcatcatcatgaggatggcaccaagaggatggtgttaaaccattcatgagaaatccacacacatgatccagtcacctcccaccaggccccacctccaacactgggaattacatttcaagatgagatttgggcggggacacatatccaaatgatatccatgtttaatcagaaaaataaaagttaacagtaacagtgattttactttgtagacctttgctaatggctgaaatctagctccattccgagaacagcctgcggtacacattttgaaagatagttgattaatatgaaagaagccttatctgtagtccttaaggccattatggtttacatatatgagtaaatattccaaagtagccatgccagttaacatatatccagagtctaaaggccactgggcgacaaaagtaaaagatacatagcaattgttactttatatcacagtaattcttgtatattttaaatggatatttgcatttgaggatatccacttaagagttaggtacatggctcttacatttaagtaacatttacttaaatttctggctgcagcaattccacataggtagaaatgaagtctgaattgagttgggggtctttgcagtgctctctctgttcattggctattttgacaatgctgagagatgtggttagccattctttttcatttcatattggcaacctagagagcaattaagccttctccccttaactagatgtatgttttactcatttctggatctttatggctgactttgaatcctagcctgtggtagaaagcatggtgtcagaaggaactatgagttaagactatgcatacttggctttgagtcttgggtatcatacctccctcatagagtgaaggaaccagggattcttcttgaggcccagacccggcatccatgttaagaatacctgtgcaattttgcttcctgatatttaaggtgaaaatgcatgtttgggtcattgtgaggattatgtgagatgttacttttaaatataggcccccttattatatgctctcatagtttcaggcaacacttgtcgtatttgtaacctcagttttaactgtaatgtttccatcaatgtccctcttacctggtacaggggctcttcatattcttggattacaaatctgtgaatgcaaccatgcatcaaaaatattcagaaaaacaatgaatgcctacctctgtactgatgatttataggtgtttttcttgtcattattccctaaacagtacaatgtaataagtatttatatagcatttacattgtattaagtattataagtaatctagagatgttttaaagtatataggaggatgtgtgtaggttgtatggaaatagtatgtcattttatatgtcacttgaacatttgtggatttgctatccgtggggatcctggaaccaatcccccatggatactgagggacaattgtattataagcagcaagagggaaaggaatctgtctattttgcccaaaatcgtgttcccgggacctagcatagctcctggcaaagagtatacaacaaatatgcattgaggagagaacagagggaaccattatccccttattctcgctgttccttcatgtaatgaataaacagtcaaatcttacaagagattttaaaccagtcagagaaaagttggaagttagttagttgttcatacattgagaagcctcgacgctgtgtcatctaggtaatgaaagatctagggaagtttagcagggagaagaagagagatgatagttgtcttcaaatgtttgaaggactgttacggacacaaaaatttaaacttgtgctgaataattccaagaggtacacagtctctcgatagaagctaaagtggggggtgacatttgactcaacaaaaagccatctaaatatcagaactttcaaaagcaggaactggtgcctcaattaatagtgtgttttctagcacttatgatacctgatcataggcaagataatgaaaaattgggacctgggagttatacatgggaatttgtttatcagttgggtgattaggagaggtggccttaaagtcctgttgtgttctaagagtctgtgattctgagtcttatttcccaacaagagaggtacagagcagaagatgggattgggagaaataggataaagataccaggaaatcctaaaggtaagaaaaggaaggcagacctgaagctaactctatacttcaggtgcttgcctagagccagccctacctacttagagaatgttgaagagccagttaaaacatctttaacacggatgtaaaacaaaactatcaaaacctgaagatttcgaatgttctaacctactcgtcagttgggcttttttcacaaatacttcagtaaataggcataaatttattttttaatgatagaaaatatctcttaaagaacttataactgtggataaaagcaccaccataaaaatcttgtggtgaaatatatatatatatatatatatatatatatatataaaattttaaatatggttagctagaatatgacgacaatgtttatgaaacacagagactcttgacaagtcccatgtatacactataaaactttaagttatccactattcactcactaagcttatacttaatgagtgtctgctgtgtcacttattgcggaaggcacaggcggtatagcattgcacaaaacatatgtggtctctgatggagtttttcagtctagtggtgaaagcagtgaatgggtgtacagatgttaaataattgtacaattagttgcatgtgtaaacgtcaaagttcagaagatgacaattgatctacggcaatgtttctcaatctctgacgttttgagccaaatacatctttgttgtggtggactgccctgtccactataggatgtttggcatcacaactgacctctgcccattagatgccaatagtactctcttctttaatcacaaatttgtcccagacatttccaaatgtcccttggggagcaaaatcatccctagttgaaaatcactggtctagggggaggtctttatgaggaagtaacatctaagaaagctggtatgtttacatatagctacagtctattacacatgtatacatatgtaacaagcctgcatgttgtgcacatgtaccctagaacttaaagtataataaaaaaaatgtaacaaaacaatacagtatgataagtgctatgggaccaaagatgaaagggttctactgcacagttatgaactcatagttaggcttttggggtcaaaattttgctgaagatatttgccacccacgtgacctttggcaggtgacttagcttattcatgcctcagttttatccaatgtgaaatggggctggaaagtcccatgtacttcctaataactttgcggaaataatatgtggttatataggaaaaaaaaaaaaatcctagaagtatgcctgctgcgtagtaaaaggaaggagaaggataaagagaaatctgcattttttcttctgtaatggggcagatagtaaatattttaagttttgtggcccaaatagtctctgtcacatttacttgattctgcagttgtggcattggaagcagctatggacaatacttaaattagtaggtgtgcctgtgctttcaataaaattttataaatacaaagtttgcaaaacaaagttgttttttttttttttgtagtttgctgacaccctagtaaagaagcaccattgtcaacgttaaaaattatcaaatttttatttttcaaagttttcaaatttgctttgcttggtctagctcatgaaataagtcaaaagtagcaagacctccacctctaaaataataatagtaatgataacctcaaaaggaaagaagaaatatttttaaagaagaaaaattattgttaaataggattattgtgcagagaaaacctaggagactcaattttaaaatctgtgaaataattttaaaaatactttatgaatagatacataatagcttttattcatattaatgactataaatgcaaatggaaatatttcattcacactgatgacaatgtataaattaaggaggaataaaaattgtagaccctataggtgaaaagcataaaaatatacataagaaaaagcaaaaattgactacgtaggattgttttaggatttaagatttattgtcattaaacttgcaataccagccaagttaacatttgaatttaatacagttataatcagaatgcttttgatgtgtttgggggcaatataatttcaaaggaaataggcaatgatgtaatttaaagtttatatagaaggaaattgtgtgcgtgtatgtgtgtgtataaattggaaacaattttattaataagcatattatggcagcaacatacacttccagatttctactatactttgaagtaattgtgatcaaaaccacagtgtgctggcataaggctagagaaatgggttagtggtttacaagtgagagtccaggaaaacatccaaataagattggatattttagttctgtgtggatagcctatttcacttaataaatagtgtctcgtaattgactattcatgtacctataagtttaactatagaccaaaaaaacgccctactagattaaggagctaactagaaatataaattcatataaacaataaaggaaagtgtaggactttataagcttcatgggagacagatttttggtaagtcaggaagcctggaagacttaaaacataaaattggcagactgaattaactgatagtttaaagcttccatagagcaaaataaatcataaaccaagttttaaaatatataatggatttagagaaggtatttacaaaaatatatgactaatggaggttaataataacaatatgtaagaaggatatgaaatggcattttactataaaggtcaaacaaatgacctataagcataataaatcatattaatctccactagtaataactacacacatctacataatatagatgttacgcctgcatttgatttactttatctgtcttttggcagaactatttgtcaccagataaaaaattctatatcattaccagaaaggtatattattataatgtttattatgttgcagttgtaaaagaaataacagcttttcaattgtttacaaatcctatagaacatttactgaaatacatttacattttgtggcaaacttggatttaaataccgtgttcgtgctttgttttatgccgttttcccatcttttctccaggaatttgattgtgcttcattgaaagctaaaaagaaaaaaaaaataattctggttttggtttaaaaaattaggttaggggttaaaaagttgtacgttgtcttctgtaaaaataaaaaacaagttttctttgtttcttggaggctttatattaaatggatttttaattcatagacagcatattgtgatgaaatttccccatgagcttcacattttgtttcaatagcagaaactaacttggttgcagttactgcccttctgagaacagtgttctggaataattttgacatacatatgtatctctttttaaaacatgtgttaatcttttcataaagaaagttttcccagctgtgtcacctgtgactccaactttctggggggacagggatatgagatgttggaagggaatggcttgaagaaataaagtgcaaaagacgtaatgctttcctgtggtagaaatgtattcagtgaccctgaatgaccttcctactcttgtcccttcatttttcccacaagtatggtctgggcaattataaaaattgacatttgcagtgggctcttctgtaaaagatgctcaatcagaaatgatttattttagaaaaagagatgatataaacatatatatcccctgtctcggaagtgtgaaggttgaaaagcaaggagatgatcttcaaagtgtctaaaatattgatttgtaacatcgttttatgaaagtgcttcagattattttttttcttggatggccccttatgctttggtcagttgatgctaaaatctgaacttctttattttaaaaaaaacttttaattttgaaaaaggaagttcacggtgctgtctaattctttttagatagtcattaatgtaaatgtaagagtcattctgagaaccacatctgctgatatgttccgttaaattacaagttctatgtgtatttgctttgctttcatacaatgaatcttctttactctcttccccacctgccagaaattgccccactcaacgttcataaaaggtccattttcaatcgctatatttatttcagaagcagagatatcatatattcaaattttagttactttccaatatcaagctaataactcacacaaataaatcaaactacagcaaaacagcaatctagcattcaacaaaacctccccaatgcacatatttcaagctgtagatatgtatcatccaccatgctgaaataatgtacatgttcaaatcaaatggaaaactagaatcaaaattgttgattacttcttatcagggcattttattatatttaagaaaaatacaaattaaatcattttcaggaagcaatccttctggctaagatttttttagcataatgcttaaagttaattgttgatctttatctataaattcaaaggtggactaaaaatgcagaatcaatcaggtagtccattttgcatcaggtgaaatatataaagcataaaacagcgagttacatttcctaacaaaattgaattacagtgagtaaaagtgacaggacaaatgcattaagaaaagatggactgaaatggatagagtagaatatatgcatctataaaacacagtcatatataatacactcattttttttcttacgagtgtgagattaatggaagaaaacaacaataataacaaaaccagtgtgatgtgtcagatttcaccttttaattaaaaaattattcacttcagaggggaattttctttcttgggttagctcaatcatgtcagatcttgttcatttaaaaggtcagtttacttgccttctgaggtttttgtttgggaaaaagaaaagaaaatagattttcattggtatcctgggtagaattaattgtttatcattcatttttaagatctccgagaggcagaaaaaggggaactgtgcaacccttttgtccttctggatctcaaaatgaagggatacattctgctacatgaaatgtggaattaagaccatgatgcaacatgataaacaacacaaatttgggggtgtctctgtgctatacattattgaatttttccatgctatacactttttggatgtgtctgtgctatttattcagtttttttaaataaaagtttttgtagactaaattgccctctctactttgcatcgtttttgaacaaaggattttcaagactgataagctcaaatgtatcatttattgtattcaagtagcattcaatttttctttagaagtataatttgtagatattttaacacagaaaacttgcaacactgctcatgataggcacttattatatattttttgaaagactatatggataatgattctaactttgacttttcctgttttgccttcactttagaattaagcagagaatcaaatccatattcctgggggcgatgcttggacaacagtatctctttaaagatctttgtgtgagtcgaaggtgcagccagactgggagttattgtgaagaaacagattcaggaaggttgagaaacttgcctaaggctaatcagatagttactggcaatgttgtttctaaatcactgtttggctccctcattcaatgaatctacactatgtgggactgcctcttgctcctgacatcttttgctgctgaaataaatgaactcaaagcctagaaggtagaaaagagggagttcagaattatattcaggcacaaataccaataaggctattgcccccagaactgcaacttctcttggtttaacagataactatttagctgtgaggtacaactgaggaagtggacacacaagttatcaggagattctgatgtgccagtttatatttcttgtcacaggtaatgattcgaaatttcttaaaacagctgtcctcacagtggagtaacctgggagtacatgaaggcattccaaggagtaggcacagatagttttaagggaatttatttctagatcttctactttattttgtactcttcctgaaaactgaattgcctgaaaaaaaaaaaaaaaaaaaaaagacatctgtagtcaagacctcaggctgtttctcctttctaaccacttgccttttctaaccacttctcccaatttaagaaaaaaagccttatatttcatccaactctgatcttactaaggcttcaaacaaaagaagcatgaatgactttcatgacagggcaacatagctttttgcaagaagagtggttgctaactctttgctttcaactgaacccgaagagaagacctgataagttgtcagccgatagatcattaaaaatacgttttggtaagcaatcatcatgtacttttagcatatgccatagcaggagcacaaatgattaagcaatgctactataatacaattccttccgtttctttctactcacctatttgaataagatttttcatcatttacatctatacagacaaaaattagggatagaattgatgctgaagcctttccaattgtagaattaatttatattcttctgaaggtgtataaattgttaaatacccatccatcttattaagagatgtattttcaataaaattttatttttatgtttatcaaattttataatatacatatattgttttggtcaattgcacgttaataattgtaacaatacctcaattgaaaaggtttgttttttacatttaggacttacagtaacagaaaaaaaacactcattgtgtatacatactgtttaagaaaagtatactaggtgatcaataagattttttcaggcataaacatatatcttagttttaagatatcgatatttacaatgtccctcaaattatattattttcagtcatttaagaatgaaaagtacatttcgaatgcggattttaaatctgcaagggttgactcatttttcaagagtctttttaggggatacagaagcaagaatgtttggagttccctgatcagtatctttaagagaaggtatttgttggtagttcctagcaaattccaacagcctgatgctacttaaaagataatagtaattattttaaataatgcttctgataaaaaacattcatgcacactcagtttaaaaagatatttaaacatttgtagttgtagtttgggaactcatgatacaagtacagtctgtaaatgaagctcttagtttgcaaatatcagagataagctattaaaatgcagaaattgaaattgccctgatatatgcataaattagtgtcatctccatcttgtcagttagagtattttttagattctctctatgtatacatacatatatatatatatatatttatatatatatatatatttgtgtagctgtgcatgtgtgtatttggactaatgggtcaaaggacagtactaacccaattcaataattaaagaaaacataattttgagaattagctttatggtaattgtttgacttaaatgagtagatcagagaagaataagggctttcccttatttaaacaagcttcatttttttatccaaacatttacttagctgattaagcttcacttgtttattttcttcaaagcattcattcaggtgggtactgagtaaactgaaatatcacaccagggaacttcaacaccatccaagtcttaaaggcttcacttgttcacagttggcatttagtgaatgtctaggctactgataatattgtgagtaagttggcagggatcataagaaatgataaaatacagttcttgaaaatgttatggtttgaggaaaagatctatgtttggaattagactgacttggattcaaactctggctgtacctttgggacaaggtgttcagaaactctagcctatgttttttttctgcaaaatgatcctcttttccaggattcctgtagagattcaaagatatgtgaatgtttagaaaaagaatagacttttgatcattgttaattcccttactttccccaattagacttgtaagactgggaagaaagctacacaaaagattgaacaaattatagctgacagaccatagcaaaagatacagggcaaaacttaaaggggaaaactacacattaaattattttaaaccattaaatagcactaacttttgtcagatattacaaccaaacaccactcaaattaaagtaaactgaataaaatgcctgtttttttctgtttactgatgttttcatttgcttcattcatttattggaagatataaaatgtgttagacactgttaggtgctgagtgtataaaaaaatcttattaatacaatttaaacacgcacacacatatatatggttataacaattgatgccatgtatgtactgtttatatgcctatacattattccacagacctggggggagggggatgtagagtcttaccagaaccataggaatcttctcacatcaacatttccttttgaagtttgttcatgaggcaccatccagataatactaccatctgcaatgtggcttgagaagatgttagatttttttattacacataataaggctgtaaagtatttctgtatttaggtagaggtatgtaatacaatatgtatataaaattacatatccaataaaatctggtgttaaataaggactagcttctatgataatatagtctaaaggcttttcatttggtgttatagaaattatgtgaaatatgtttcctggagtagaattattcgcatttcagctctctgacagtggaagaaaagctagagggagaggtgaacaagagagggagcataatggacaaagctttgctggaagccaaaccaccacttcatatgtcaaatctgacaggcctcccattttaggtgtgctgtcattgaagctttcagctgcaccttgcctgtggctaggctattttcaaagattaaaatgcgaaactggaaattaaatgcaacttaattcccaatttaaatttccattatttttgaaaagtaaaagattaaaagaaatgtataattgcaattctggtggaagaggtaattataggaaaggtgggatgtatttcaagtgggggatatagcttactgcagcagagaggaatctaagctatcattcttttgaaattggtctggaaatatgttttcacatggaaaatatactatatttttaggaatttccttgtcatattactgtatccttttctgttagaatataaattctgaattccctattccactgtagatctgcctccgattatattagctcttctgaagttatcaaaaaataatgagatatacaatattccatatatgtcaaagcaattatttttaggttaagtaataaaccaatgacctttaacccggtaatattctgggttgttcataaaaaaactatattcaggtaataatgtctttccacttaagcaactgaaaaaatacacaatacttaacatttggttaattaaatacctactccagacaaaaggattttctgttttcaagttatcttagcaagctgagcaggaagcaatgatatatccaatcagaatatccatggaagctctgctacagtttcaaaaagttctcatcaggcagcttttaaaatgcctactctgaaaatggtccaggttaaagaacaacagcttcctcgtcagatagcagtattgcttggccatgtttcttcctagcacaaaaaagtacctgctcttctctgagtacctacattctaaggactatggcttacataaaacagcatgggttggggcaatttccagcacactgctcactctcgaaaacgtatgatgcaggtgagagtaatgtttttgtttgaatctgctttcactcgtggaagatgaaactacttgcaaagatctgtactttagctattatgagtaacaaaagactcctaaaatattgcacacattgtggggatggagaaccatcatcctgggatttgatggatcctatggtttggctttgtgtccccacccaaatctcattttgaattgtaatccccacaatccccacatgtcaagggagagagaccaggtggaggtaactgaatcatgggagcaatttctcccatgctgttctcctgatagtgagtgagttctcacaagatctgattgttttataaggggctcttcctgcttcactgggcacttcttcctgccacctgtgaagaaggtggcttgctccttctcaccttatgccacgatggtaagtttcctgaggcctccccagccatgctgaactgtgtgtcaattaaacctctttcttttataaattacccagtctcaggcagttctttatagcagtatgaaaatggactaatagagacgtgtctctcagaagtcacagtgatgcttgaacggatccagagctccttcttcaggaaggtcccaactcattctgaagggtctctccaagcccacctctctctgtaaatgggaaaggttttactttgagcactaaaacctgccagaattctcaattttcctaacagtgtgttaataaacacctactcatttagtatccaaaccaggtctgtatttctcaattagagctcaccaggctttcatcataaagtagagcttcaaattgtctgcaatcccactcctatcaaaaacctagaaggaggtaatatttcagagtaatactataaccagatgaccacatctaagaaactgctgaccctacgatgtaaccttctgtccatttttccctttggaaagtctaggatcttttcttataccagcaagttacaagcctggactacactaacttgctttccgcagaagaaaacaccatgagttctgttttcatattaagcacttagtctccatcagacatcaatcgagaaaaaatcattaaaaatcacattttatatttgatgtatatttctcaataatcctatgtattagttcattttcctactgctatgaagaaatacccaagactgggtaatttataagtaaaaagaggcttaatggactcacagtctcacatgactagggaggcctcacaatcatggtggaaggtgaaggggtagcaaaggcatggcttacatggtggcaggcaagagcgtgtgcaggaaaattgccctttataaaaccatcagatctcctgagacttattcactgccataaggacagcacaagtatttagctccctcagcacagaaccatccccgtgattcaattacctcccaccaggtcactcccatgacacatggggattatgggagctacaattcaagatgagatttggatggggacacagccaaaccatatcatcctatttggatgatcaatattatcaaggtatgctcccctgagggggcgtcctttttaccatttaactccaggacaaaagtttatttctttgtaaggacagtgtttatttcttatggtcctattttctcctaagatccagacaccaaaatggccatctatcattgacttaactcctgaattttgcttagagtaacagatttagtgaatctaaatattttctggctgtggaatgttaatttatacatgttcaagttacctttgattcatgtgacagtttgtgccaaaacacactcattatcagaactcagatcattatgttggctcttgttttcgttactaaaggaagaaaaacagtttctcaaaaagaaaattctgatacctaggaagaccattatacctcactcttttctttatctcatcaccacatccaatattataaaagaacttacaaagtaaaaagaaaggtgttctgtagatgtagcgcctggcttgtatggtagcttaaatgaacacagctaaaaatattttatggctagtgtccaaaacagtctggcaccagacaaaataagaatatttaaaattatattttagagttactttaagaggaagggagagagagatgtaggcaggaggaggaggagcaggaggagagggagagagagagagagagagagagagagagagagagagagagaatctggggtttctatggaagggctaagaatatgtagaaaacagtttacaaagaaatatggtccaagaatcgtgtgtacacacacacacacacacacacacacacacacaccccctggaatatttttcagccttaaaaagaagaagatctgtcatttgtcccaacatggatggacctggaggaccttatgctaaatgaaataagccagaccaagaaagaaaaatattgtatgatctcacttatatatggaatctttttttaaaaaaggtcaaatatatacagatagtgaattaaacagtggttaccagggtcagggtagttgtgaggaaatggggcaatgtaggtcataggatacaaatgattaaaatatattaatatattaaaagatataatatacatcatgaggactacagttaataatagtgtgtattcaagatttttgataaatgaatagattatagctgttcttgccacagagtgaaaaatgggtaactgtgaaatgatagatatgataatgttctccacaatggtaactattttacactatatatataaatatctatgcatcttacaccattatgtggtatcccttaaatatatacaataaaatttattttacaaacacatattaggaatgcatattctgatttttaacaatagttaacctcattaatatatttcacactatcatttctagtgtacatgaaaagtagtttattgacattagttgtaaaaaaaaaaaaaatggtcttgagacttttgggtcagagaatgttctggccataaggtaggtttctgcttgcctactagatatcttaacttcgatttcctgaacatcccatcacttcagaatctctcaatcctttctaacatccgcaacattgtttttctttctgcatttcttatattgactgatggatttataattcactttctctgaaaaaccctgcagttatcatatatccctatccattctggctctttattgcccaaatctctaccaaaatcctgtcagcacagcctctgaaatatttctcaaagcatttataatctggctctcatcaacattttcaacactctgttttatcattccactattttacatcatttcattttcatttttaccacaatcactcatccaacaaataagtatttagctccctcagtaattagtattattattattaattataactagatgctgagcatacagaagtgaacatgacagacataatcccagcagggatgtcagactttatgcaagtaatcaaccatgatgaatctcatgagattctgagagagagagagagagattgagagagagagagaaaggggaaccactggtgtccgagttagaaatttgaattagtatctgggtcaccaaaagcttctgtgaagaagtgatatagacttggccacacaaaactaccgtgaaggtggtggaaatttttctatgcagagtaccacatttaaagagctaagcctgagagtgtcagagataaaggaacagaaagaatgtgacagcagattatgtttggaagaaagatgttcaagagaccaagctaaagaggagatggggctagaacctggagggtccttcgggtcctgttgggagttttttctctgcccagaagggctttgtcacgtggttgtcaggaaagagtcatgattagagctttgattcagagacttctttcgctgaagtgtggagaatggttcagagagaagcaaatctgaatggacaaaagaggttattattgtaatcttggcaagaagcgatggtggtcttgactaaaatagttctagtgagaatgtgacaacaaacctgagaaaaatacaggagacgtaattgacgggggttagtgttaagttgaacgattgcagagttgaatttgaggaaagtgtcatatatcattcccagtttctgatgtcatacacctctggagataacactgccatttcttttgaaatgggaaaataataagtgatcagtaagtacgtattggataaaataatgaatggttaaatgcataaggggagaggaaaagagttgcagagaaagagagtaaacgtattttggatgtgttaattttgagatacctttgaaaaatccaagtgaggggttgggtagtcagagaaatgaatgtggatgtcaggacgaaaggtgaccgtgatgaactgtatgtcttcctctaagcacgttatacagcttcatgtcacaagtgactcacttcatgtcacaagtgactcacaaggtcacttgtgacaagcatttgcctggtgcttcatccctaacctccctttctatactcagctaaaatgtcacctacaatacttcttccttgactccaccgtccccactttactgatatgaatacattttaataaaatgatataataatgcttagtttgtaaacctaatgttcctcaagtggtataattatctgatttgtatgtgatcatcaacccaaccatattaggagcaccttgaaggtagaagatttaggttcatgcttaacaccacatctggaccactgtggatttaactttctacaatgattgtattcattaatatattgggtgcccactatattccaagtaatatcctgcacactacgtacaaggaagcataggtcccgtgtgctcatgaaactgtaattttagtaagcagggataggatacaaactgagaaaggaaaacaatttagaaagtgggaaatattatgcacagaattaataaaaaagagaaaaatcttgaaaaagtcttcaatacctcacttggaaggtgattttgaagaagaactgatggacaaactagagtcagccatgtaatgatgtaggggcaaagcattccgggcacaagggacagcttatgcaaagaccttaaaaatgaactagctttgtatgttggagaaggataaagagaactaaggtatctataaggtaattaggaagaggatgagttatttagtcccttagtctttgaagcacattatctcatacttcaattgagtttattcttagtgtcattcttctggatgcaatatttgagataaatgtcttaatgaacgttcacctccctccgtagtaatgcctgagtgtcacaaaaactttttttgtttacatacgtagccatctaatggaaacataaaataggaatcaaaagttgagtttcatgtacaaaaggtaaggactgtacatgtggtcataacaacttcaaaagcacctgaaggtaacctttaaggaagatacaaaggctaggaaatatctaggatccatgaagacagacttacttaaggtcatagtgtgtccagagttggttcccgccggtgggttcgtggtctcgctgacttcaagaacgaagccacggacctctgcggtgactgttacagctcttaaaggtggcacgaacccaaacagcgagcagcagcaagatttattgtgaagagcaaaagaacaaagcttccacaacgtggaaggggacccaagcaggttgccgctgctggcttgggtggccagcttttattcccttactgtcccctcccatgttccatttctgtcctatcagagtgcccttttttcaatcctccccacgattggctacttttagaatcctactgattggtgcattttacagagcgctgattggtgcgttttacaatcctcttgtaagacgggaaggttcctgattggtgcgttttacaatcctcttgtaagacagaaaagttccccaagtccccactcgacccagaaagtccagctggcctcacctctcaatagcattaagaatatagtttcacgagcatatatgaatcaaaacttacatttgccaattttatttgcttgtttatgtgtttccaacatgtcttgtcttagggccaaatgtttccctagagaataactattccaactatcttagttgctgtatttttatgcaaccttcaactctccatactaaaatgtctccagaatagaaaataaatcttttcaaagtttcaaaagaggctctctatatattccccttaaaagtaccaggcagacatatttctaggtttctaacattgcgtgttgccaggaagtatatccaaaccatcacaagttattcatgtaaccaagcacacttattggagtgcttctgcttctgttcttgcttgaaattggaagctccttccaggaaaaaaaaaaaatatctatagaaggggaaaaaagtaattttactttgaaaataaaatatacgtgagcaatagttttattctgtttttaatttaccatagcttccaaagacaacattgttttatagtaggggttagcaagtgttttctgtaatgtaaacgtaaagggccagagagtaaatattttaggctttgttttctatactctgttgcaactattcaactctgctgttagaatgttgaagcagtcatagacaatagagaaatgaagatgtgtcattgtgatccaataaaactttatttacaaaaatggcaatgggctagttacggcttgagggctgcagtttgcagactctcacttcagagctaacagttgttgtcaggagtcacttgtttttggaaacctacaatgaggtactataacaccaaaaagagttatcccttcctttttctctctcactttttgaattatgagaagaattagaaatgtagttaatgataatgtccaaccagtgtaattatacttgttagaaacacagctggaagcctgttgtccagtcttatttctcctctgtgatcctcattttcagaggttgaagtcataagtttgccatgtctactttctgacaggggaattataataatgtggagtcaccttttgtttgtgactttgacaatgcttcattgacttactcaccaattttctaatttttatgaagactttttgccgaaatgtagactcagtcttctctcttgtctactctttctataacaattaacaatgaacttatttacctttttaacatctttttaaaaattttctatacaccttgaaaatgtgaatacaaagtaatgctgcatcatgtatattgccttattcacacatagcctcttatggtatatcatataaaaatggaacaatacagcaacaggttgaatgaacagtaatcaggtaacaggaaaatgagatgtctttaatatttcacttaaaaactcaatttcctaaagcatacatataaatatttggaagtatagttagaagaaaaatatctttaaaatattttaattgattagtcttatttataagataatttttaggaggctggttgcggtggctcacacctgtaatcccagcactttgggaggccgaggtgggcagatcatgaggtcaggaaatcgagaccatcctggctaacacggtgaaactccgtctctactaaaaatacaaaaattagccgtgcatggcagcgcatgcctgtaatcccagctactcgggaggctgaggcaggagaatcacttgaacctgggaggcggaggttgcagtgagccgagatcgcgccactgcactccagcctggtgacagagctagactccgtctcaataataatcataatcataataataatttttaggaagcatcagaaatatataagaaaaagattattttcttaattgctttactaaaaacacctctatgatttttcagtaaaacttgattcttatgtcatgtgtgagtgtgatctgcctctcttgggatactactgtactcatgaggagtgatttttttctccaacgacctctttgtcacgtcaacaggtcacaggaatagtgtaccctaaaaagccacctgccacatgctgctgaaaatgtaaaagtacacacatacacacacacacacacacacacacacacacacacacacaccaaaatcaggtatcacaagctgaaaataaaattgagtccaatttttttttaattgagcagttaatgtccttaaaacaaaatcctatactgcaacaaatacttagccagatcattctgatacctccaaactgtggtgtattccaagatacctctatgatctttgatttgatccacagcttttcagttatcatgcaaataccttcaagttttatctcatttctcagtgcaaactcattaaaaattttcagctgaattcaattttataaacatgttgtgaatgtcctctttatataagcaaggttgtaaggaactggccacataaacagaaaattgaataacatatggtttctggccttagtgatctcatgtgtgagttaggcatatgggcaaaatcagaacactatagagtataagtctaaaatggtagtattttataatagaggatgaagagggtgctgtgggatcataggtgacagatataactcccgttgtgggacttgagaaaggcttcacagtctggaaacatttagttgctattgaacacaaaataagactcactgttgagagaagggagagggagggcatttcaatcaaattaagattctgtggcatattcggaaactgatgtttttaaaaagagtaatgtttattacattcctctacataaattatatttctatgtaatatgaatgacaaatatttaacacaaaatgccttataacatttgaatgaaatccatcatatgacctgttatctatttccatttcctttttgctcatatcattatgaacaatgacctgataaattttttataagactttgctgaattagtaaaggattattaagtttagaatgaacaaagctgaccaatcattcaggcaaatttgaccgttttgttgtcgcttttcttatttctgaaaccatacaattccctgaaatgaataagtacatatttgataacttcctaaattaaggctcaaaacactggtaatctactgggctttcatttgttccttctatttgtctaatcctatctatatttctttatatgagctatgaaaatattagatttattaagttgtcctttatcttaatagagaagaatgtttttctatgacattaagaggaatttgatttttttctttaatgatctacttttaattttggtagagtagcattgataagatcaatattacacattgttaagtatgcattacatgttgataagataaatattacacttaaaatatgtttatcaaatgtatgaatgataaaaacgaattctgaaatgtatgggaaagatcttgaataaaggtctatgtacatttcaaggatgtctacatatgcaaattatcataatataataactattgaatatgattatcttcacatactttctttatttttcatctcttagatgaaattgggtattgttttcttatagctggaacaaagcattacagagaattcttagtgtgatttcattgaaactcactgttatatgagttcaacaaagtttaaattagtccatgacttaatcatcctttataaatcctatcactagtattcggtaaggacaaagtcaattaaaaaattagcaacagaagcattaaaagaaggattaataaatacaaaataagggatgtgatatctttacgtattgctgagatgttagtgctaaggaaaaacttccctgttcataatgtgaggtgggaaaaagaagaactattattgtatatttctcctctctaaaactgcctatctgactgtgtttttctgtgtcagccgtattaacagatgtttaattttactcactttagtatataaggcatcataatgtatgaactatttcaaaggccctatgatggctaattaaataaaaatatattaaatattagctggacaaaataaaatatgtattaattttggaaaaagtagatcaaggttttgcagatcttttcatatcaatatattcatttgctgaataagcttttattgtttaccaatattactagttttatagagatgtagatatcaccacagtatgactaattttatagggacacagatagatagatgttattttattccaatcttatttttacatataacaggtataaatatgcgcttgaaaggagtatatcacttaggagtcagtcagaaaagtaaagatcttctagtctaatacagtggttctcagccaggggtgattctgctgcacgctgagggataaattggcaatttctggagacatttttggttgtgacaattgcaggagtgttactggtattcatttggtagagacagagatattggtagacactgtacaggacacaggaaagtctcttacaacaaagaattattctgtccaaaatgtcagttgtggtgaggttgggaaacactggtctggaagaaggaatttactatgaggaactagttacgaaagtatagagacatttaacaagctgaacaaaggatagtgagatggctcagagattagcaactgtggcatgaagccactactacgtttaggtaaaaataagctaccatttattcttatagtaataataataataattattattattattatttgagatggagtttcgctctgttgcccgggttggagtacaatggtacaatctcgactcacttcaacctctgcctcccagattcaagcgattctcctgcctcagcctcctgaatagctgggattacaggtgtgcaccacccctcccagttaattttttgtatttttggtagaaacggggtttcaccatgttggtcaggctggtctcgaactcctgacctcagatgatccatccacctcagcctcccaaagtgctgggattacaggcatgagccaccacacctggcccactctttcttttttaattattgagaaatataaaaatatgtcaaaagtaacaggtgtggtggagttacagcatgcacataatgggatacagcccattatctaatctcagatggaaactagaaaaaaaagagaagatctttgctaaagcacagattatgtggaaaatcatttagaaaaatagcttatcacaacattaaaattaaatcctttagctgatcatttttccttgctattttttcttttaaaattgagaagacagtgagttttttttctttattgtcattatcttgatgtcaaaaaataatatgcacattataagtgggaaaaaagataagtcgaaatgaaatgaaacaatgcgaggaaaaaaatgtcacaacactcttcaattagaaaaaatgacccccatctttcctccaaatagaaatgacgtaactgaagtagtggaactttctcttccatggcaactctagagaaggggtagatggcatgggattgtggacagatggacacagaaagaggcctcatttattgttattgttaaaacttttacttctagtaatagtgacacctccttcagcatttctttatcaattgtcaatattttttggatcaccagcatcaccttctatatgtatgtctagaaacctcctgttatgaatttacacttctcagagtcaagacagaaatgctgtgaattgggcgataaataaaataccccccttttattgccttgctttgtctcttaaagaaagatgcctgttgggggactatgagaatgctttgtgcttctggacctcaagggacaaatctataataaaaattatgcatagtgatgagaaatatatataatgcaagtttgtagagatcagttaacttatcttgtctaggcaattatttctaaacaatgatttcaaatcattaactataatatagcccattcataccctccatttttgtcaaatccctgtcaccttcaaggacttggccatcccataggctgctctgcttttaatagaggaagatgctgtaactcttggtaccattgccagttatgaatttatccattaatgaacattgcatttaaggcataggtttatctccttctccaggtatgaacctgcaggattcctacctgaagcttaagggagaataaatccacctgggacaatcaaggacagatcaaccaatcagctcaaagcaggtgtgaattacacagtttatttgagtgacaaggtagctaaagcagggataataaaagaagggagtgggttgatgtggacagacgaactatggctttaggaaatttggtagggactgaaacatattttgtgtaatttatgtgggtctaatagcttttgaaacttgtttacaagacctgtgtaagtggtactggcatattcatgcatgagaaaacatcaagggaaaacttaatagttcaaggaggtgacaaagaagagaggaaccaattattttcactagccgtcaaaagcaagaaaataatcagcttgagcccttcggggaaaagataggttaaatattaagtaacagtttgttattattccaagtgttttcttaaagttgctcccatactttcctgttttctctgagggaatttagtttttttgttggtttttttttttttttttttataactgtcattggtcagagcttgatttgatgccagtcaaatttttttaaagagattatgaaaactgcttaaactcttccaaagggaagatgggtcattcttaacatgtgtttcaagaggaagagcataagagcattatatggtaaggctgaaagcagatatcagcgtttaggggccatgaagaggtagagctcacattggtaggatcattgactagaattccagagatcaaaattgtatgttagtctagcattggggaggacttgtagctagtatcttcattctagcttgggagcctaggaatcaggttaggcatcttgcacaggaatgggccgatgggctaaaatctccttgagagagatgattaatccaggacaaaccaagcagtcatgccaatgaattactttaacagggtacttcatatcctcatcctttgggcagcacggtcttcagagatggggcaggccccaggctgcagttgagattctataaactaaggtcaaaaagatgcagcagtgaagaagtcatgcttatcttgtataaatcatgttttcttttctttttaatgaaaatgtacatttaacacattttaaaactaaatattgaccctaaaattccaaccaaaaaatgctacataagtggtatttatttttgaatttccctcatgctcctcccactgtggggacaaggagtggtggtggaagagagatcttttagcaaacctgtgagtagagaattagaaggtaatgggaggaaggtaaaaggaaaacatcatagatggataggctcacaaacattaaaggccttcgtgcctgtccttcatgcctattcatccctctccagtatgtgaatcaatgtacttgttaaatattcattcacctcacatatttagcattaaccgtgtatcagggacgttgttagaccgttggtttacgatgatgtgtaaaatatcatttgtaactcagactaactggaagtgctcaatataataagatgtaatgttatggaacactaagtctgtgctgaagacttatctcctttaatcctaaaacaatcctggtgggtagtctcaatgatcatctccaagtcacagttgaggaaattaaggcttcaagaagttaagaaactggaccaacatcacaaaggtagcatcagagtgacagtttgatttcaaagtgtacttgacttcaaggcccacatttccttgcacgtttaatattgcctttctcaggtaaatataccattaaatgtgatacaactctaagcatttgaattacttacaacgtgcagagttaaaaccagcattatttacactatacttcagctcgtttataagtgaactattattttgtggactaacctatgaaatgtaaccacattgaattcctctgttaggtacaggtttggtgattccagggaatagagtatgactgaatgcacaggtaggggtgaagtgaacccggtcagaaaatttagagagcatcgagcagatcattaagcagctgtctttcaaatgtgcagaacacaactcatttgtaatctagggactatctgtattgattcttcccagggaagttacttatttttatacatatgtggtgtgttctgtccataataccattctacatggtaatgctcaactttattatttaaaaaaactgctaataatgaggtttttctttgtatcacagaagcagcaggagcaagttttctttttccttcccagtttttttaagtactgccaaggaatgtgattttgtcagacttgtatttcctattaagccaatctgcatgactgttccttctactagctttacctgttcactcatttattaattcatcaaatatttgtagagtgactattgtgtgccacatactaatataggcacaaggataaccaaaaacagacaaacgctgtcctttcaaggagctcatatagtaatgggaagttaggaaaggagaaaataaatatgtggtatttcaaatggaagtattaaagtgttaagaagaaaagagaaactaacaagatagggaaaaagtgacaggaacatgatgttttattttttatttatatatattttttgagacagggtctcattctgttgcctaagctggtgtgcagtgacgtgatcatggctcactgcagccttgacctccctgggctcagatgatcctcccacatcagcctcccaagtagccaggtctacaggcatgtaccacgatacccagctaacacgttttcttttcttatagagacagagtctcactgtgttgcccaggctgttcttgaactccggggctcaagcagtccacccacatctacctcctaaggtgctggaattacaggcatgaaccaccatgcccagccgaaattgatgttttatatatggcagtctgggcagacctctttgatgtgatatttgaacagaaatctcaagagagggagtgtattagcccgttttcataccgctagaaagaactgcccgagattgggtaatttataaaggaaagaggtttaattgactcacagttcaatatggctggggaggcctcaggaaacttaaaatcatggcagaaaatgaaggggaagcgaggcaccttcttcacaaggtggcaggaaggagaagtactgaggaaagggggaagagacccttataaaaccatcagattttgggagaattcactcactatcatgagaacagcatgggggaagccaaccccatgattcaattacctccacatagcctctcctttgacacctggggattatggggattataaggattacaattcaagatgagatttgggtggggacacaaagcccaaacatatcattttgctcctggcccctcccaaatctcatgtccctttcacatttcaaaaccaatcatgccttgacaacagtactccaaagtattaattcatttcagcattaacccaaaagtccaagtccaaagtctcatctgagacaaggcaagtctgttctgcctgtgagcctgtaaaatcaaaagcaagttagttacttcctagataaaatggaagcacaggcactgggtaaatatacccattacaaatgggagaaattagccaaaatgaaggggctacaggccccaagccagtccaaaatctatcagggcagtcaaatcttacagctctgaagttgtctcctttgactccatttctcacatccaggtaacactgatgcaagaggtgggttcccatggtcttggtaagctccacccctgtgggtttgcagggtagagcccctctcctggctgcttttacaggctggcattgagtgtctgcagcttttccaggcacgtggtgcaagctgttgatcgctctaccattgtggggtctggtggacagtggccctcttctcatagctccgctaggcagtgccccagtggggactctgtgttggggctccaaccccacatttcccttccacactgtcctagccgaggttctccatgaggtcttcattcctgcagcagacttctgcctggacatccaggagtttccatacatcctctgaaatctaggcagaggttcccaaacttcaattcttgaattctgtgtatccacagactcaacaccacgtggcagttgccaaagcttgggacttgctccctctgaagcaatggtccgaactgtaccttggccccttttatccatggctggagtggctgggacacaaggcaccaagtcctgatgccgcacacagtggtggggttgggggggggacctggtccacgaaaccatttttgcctcctagacctctgggtctgtgatgggaggagccgcaatgaaggtctctgacttgccctggagacattttccccattgtcttgcctattaacattgggctccttgttaaatatgcaaatttctacagccagcctctccagaaaatgggtttttcttttctactgcattgtcaggttgcaaatttttcaaacttttatgctctgtgacctcttgaatgctttgctgcttagaaatttcttctgtcagataccttaaatcatctctcaagttcaaagttccacagatctctaggtcagggtcaaaatgatgccagtctctttgttagtcatagcaagaatgacctttactccagttaccaataagttcttcatctccatctgagaccacctctgcctggacttcagtgttcgtatcactatcagcattttggtcaaaaccattcaacaagtctctaggaagttccaaacttttccacattttcctgtcttcttctgagcctcctaactgttccaacccctgcctattacccagttctaaagttgcttccacattttcaagtatctttatagcagtacctcactacctcagtaccactggtcttaactcctgcgctcaagcgatctgcttgcctccacccctaaagtgctgaaattacagacatggtccattgtgccgagccaaaattgatattttatgtatgacactctgggcagacctctatgaggtgacatttgaacagaaatctcaaggaaggggagaaattatccatttacatatttggggaaagagcattccaggtagaagaaacagaaaatccgtagtcttgaggaatgccgtgtatatgcagtatttttcaaacttgttattttgaaatacatatacacttacaggaagttgcaaaagtattaagaaagatcatgagtacccttcactcatcttcagctaatggttacatcttacataattatatgtaatatcaaagccaggaaaccaggaaattgatgttgatacaatctatgctttattcagatctcacatcttacatagctatgcacaatataaaaaccaggaaattgatattaacacaatctatgccttattcagatctcaccagcttttacatgcacttatctgtgtctgtcattctatgcaattttataccatgtttagagtcatataacaactacccctattttgatacatggtactgaatagttccagcgtcacaaaggaactatctcaagccaccctttaattgtcacacccatccaatctcccattctacttcctgaatcactagcaacccctaatctgttctccatctctatgattttgtcttttcaagggagttttctaagtaaactcatttggggaaagaaaggagatgaattgttctagccacggagtggagaacagagagtaagagtacctattgaagcagagggagtcattgcaataattcaaatgagaaataatggtgattctaaaccaggaagctttcagtgaaaacaatgagaggtacatggattctgggtatttttggaaggtagcactaccaggtttgctgatgaatggggtatggggtgggaaagaaagagaagagcccaggatgagtccaaggtggataaggtgaatagaattgagaaaatggtagaaggatcaagttagatggtagaggggtaaaggtggaagcaataattttgttttggaattgttaggtttgaaatcttgttagacatcccagtaaagtcacaaagagtgcagttggatgaaagtatgggattcagggaagaagtatgtgctagagatgcagatttgagagtcatctgtgtggaggtattattcaaattcaagtccccttggaatgaatggctattcaggcagggtcttcataaaaatgcttgttgcatgcctgtaatcccagcactttgggagtctgaggtgggtggaacacttgaggtcaggagtttgagaccagcctgatcaacttggtgaacccccatctctactaaaaatacaaaaaaaaaaaaagttagctgggcgttgtggcacatgcctgtaatcccaggtacttgggaggctgaggcaggagaattgagccaagattgtgccattgcattccagcctgggcaacaagagcaaaactccgcctcaaaaaaaaaaaaaaaaaaaaaaaaaagcttgttgcttcaaattcatgtcagtctgtaaaattatctgggaaggcagtacaaaaactgtcactttgactacgatgtttctggtgacccatcttcattgatcagtatggaaaaggcatgtctctgaaaatctctgagagtctttgatacagcaagaacataaggataaatcattcttctatgttcatggttgtagaggatcttgaatgtttaatggcagaatagccagatcacactctggcacttctgtatgagaggctgagggatgttactgattcaccccgagaaatatttactactaaggggacagaggcaaaggggatacaagacttcaccctgagctgtagcgctccctccttccctatcctgctttcattcttcacattgttttccttctttcttttttattattatactttaagttctgggatacacgtgcagaatgtacaggtttgttacataggtatacatttgccacggtggtttgctgcacccatcaacccgtcatctaggttttaagccccacatgcattaggtatttgtcctaatgctctccctcaccttttccctgtgtccacattgttttctttctttttgaagcctctcattcactaggtttcaatcctgccttgctagtgttctaactctaaggcctaggcaagttatttcaccgaacttagcctcagtgtcctcatctgcaaaatggatagttttatgatatcttcagcccttaaagtcaatggttctgacagctagggtgtactatcttcttggatatcagtcatctcaagcaagccctccttttttggaccttcttttcacacacttcacataccttagagaacataatacacatcctctttactcagggcttattctttataacaggcttcctaattcaattaactcaacttttcaaaaatattagtgactactgtgatgtaaataaatttgcattttataggggtcttagtaacccagaagggagtggggaaaattaatatatattgagagtttattaagtgctaggtactgtaaatattttcttgtatttaatcctccgagtaattctacaacaaagatattatcattgctattatgtaaataaaagaacaaagtagaaagaaacccacggtcttgtataagctcccctagttggtgggtattgaagggagtatttcaatctttggtagcttctgagtttttgttctctcagggaatctgccagatgtccagggcacctgccaaaccctatgaggctataagaaaaccattaagggtcttagattacccagctttttgggagttagaattctgaatgaaatttagtgttcctgcagctacaaaggaattgagttagggaagtgatgactttatctttagctacattggttattttccttataataatcctggcttggtagattagaggcagcccgagtaacccagaatcgctaaaatagaagtgcgagctcattgcccgctgtccttcactatgtttgcatataggaagcaagaataaaacaagcataaaataggctaactagcttgtcagagctcttcacaccaagtctttgtgagttccaataagacactgactattattaaaaagacagagactccacataagtaggaatttattgttttccttttcagtcaccaaaggacaatcctctgcataggttagcaaaaaatggtactgatcctataatctctaatattaaagtttagatttggcaagctgtacatcttatgttgttcattaacaaaaaacaatattgattggtatcttgtactataacttgtactgtgggtcaaattccaatacagcaaataccattgcaataacaattctacaaaactacatcaaaaaaacctttcatgtttgagccaacagcctgatagtgctaaggactttgagtacagtatgctagaagattcttaacagttatttgtcctggacaacaaaggttgactccattaaaaacatagccatcagtgtgggattatttccaaatcaagcttttggaaaagtcaaatgaaagtttgcaagcaggtggggcatggtggttcatgcctgtaatctcagcactttgggatgctgaggcaggcggatcacctgaggtcaggagttcgagaccagcctggccaacgtggtaaaacccccatctctactaaaaatacaaaaattagctggcttttgtggtgcatgcttgtaatcccagctactcaggagcctgaggcacgagaatcacttgaactcgggaggcagaggttgcagtgagccgggatcatgccactgcactccagcccacatgacagagtgagaccctgtcttcaaaaaagcaaaaaacaaacacgcaaacaaaaaaaaaaaaaaccaaagttggaatgcaataaatgttcattgaatgaatactgaatagggagtttcagctaatccactcaaaatagtgctgaatttccagctctaaggtcaatgcttggcatatatatcctgaaggaatgaatggacacagagtaattttttttctaaaatgcaaattcaattatgtcacttcccttcttaaaatccttcagtagcttcccgtagcctccagcatattattttgaatagtgcttctcaaactttgatgtgcatcagaatcacctggggattttcttaattaactgatgctgattcagtaggtctggggtattgtctgagattctgcatttctagcaagtgctcagggttatagcaatgattttggcctgcagaccatactttgggtagcaaagacataagccacttaacttgacataaaagactgtttagacccttagtttctctctcgctctttccccattttgagcttttgctccggttcatgtttttccctgaaaataccgtgatcttacattgtctgtctggatgctgaattttccctaattctgggcctccatgtagttttaggtttgacatcacaaccaccaaaagatttccccttctcccttaatcttggttaatgtcactctcatgtattatactgttaatgaagcattgaggacataaaacttatcaaatattttatcacaatcaatgatggcaccagtgataacatccaaatgcctgggtgagtaaataagaggagaataggggacttgttgttaaactaagtttgcagagaaaaaatgtactgattataattaaattggatgtttatttgttatgacaaaaaaggagctagagtcttttaatccaccccttggcaccactgcttatctccttgtaacatacgtttgattcccatgtctatttcttccatatgggaaatttcagctccctaaacatcaccaatacaacctgttgataagacaaagttaaatttattgcttactatggtaagaaagaccacagcctggacaaagctttggtagtatttcataaggagaaaggtgaggttggatttcattgggagtatgaagcttggtttaagattggtctttcactgtgggggcacaattaggattgggtaaggatcatggtattacaacttagtttggtggaaacagcacagtgaagatttctagccaagaggctcagagactattaaggtgtgaactctattgatgttttttgttgaagagttgatgggagtttggggaagttactttagtgaacagtcaaattatttgcctggccaagagttatctgtaataggaaagttatgctaatgaagacaatggaaaggtaaaccatgttaatgtcgacagccagctatgtgagcataaggggtaggtagctttggtcctccatgtccaaactgtttgtagtggtaagtgatcttcattctcacatagattgaaagcttcctgaggacagggcaatgtctttgtaaactttaaaatatctatgtcctgcacatcacctgccgtagacaagcatctagtaattgacggttgggtagatactgagggaaaacatgcaccaaataaaaatggcaataggacacaaattcactatcatttggaagaataacagtgttttccactgatatttgctacacacagtggggtccacagagcagcagtaccacttgggagcttattggaaatggagactctcaggcaccaccgcaggtccaatgaattaaactctgctttttttaaggtcatttgtattcaattattatttttttcttttttctttactttcgatgcatttttctttatttgtttttgagatggggtcttgctattttgccgagtctggtcacaaactcctgagctcaaatgatcctcccacctcagcctcctaagtagctgggatcacagatgtgagccaccacacctggcttgtatcacattaaattttgaggagcagtgctttaatatctattccattctcatcacttgatgaggtattattaattccacttatggatgtggaagttgaagccagaaagtttaaatgacttgtacaaggtcaaacagcttacaggtagttgagccaagaggctctcaagtcttctgcctccacaaacccctgttcagctgctgccctacaatggaataaaatatactaatcccagagggacaaatatgctaaaaatctcaatattatacactttggaaggtgcaggtgcattatctttcaattctaatttctctttcaagttttctgatgcataaaaatatgaacagcaggtctgagcaatgtttagatgccgtgctttgatccttttgccattcaagatgtttgatttgcattctgccaaggaatgtctggtaacctccatgatgcagaccacaccattagtcaagagagagctgacgtaccttcatctgagagctggctggctgtgagctgctcagagggaaaggatttctatttacaaattgtatcgattatttataaataaaagttccccttgctttcttcagttgtaaaatctgcagttagagagtcgggaagaagatcaaaactgcatacatttgcatctgccaagcctgataactagttccagaattacagaaatggtgctgaaatagcacctcaagtaccaggctctatcaaatttaatctatccataaggcaactgccaattatattttagagaaaaaatgtagactgaaaagatagacaatccaagtagcaactcctgtaaaattatatgcccataggagcaatcttgaagatataaatattggtatgtttctccttcatttatcatttatctgatcatttgacaagtatttattgaatgcctgttaagggtgtagatatatgtggtgaggctgcaggtgtaagtaggtctttctgaggatatgcatgaagttgatgttcataacttggagatgtgtgtatacagactgaggattccttcagtggatattaagaagtggagtaataggcagtaaagaatacactagtcagttgtggtacataaacacgtcagcaccacttaggtattaacttcctgttttgttttgtgtgtgcttaattacgctgtttattaaacaagcacatcataatctgcagatattgtcataaacagcacaataaagcctgccacatcagaatgtcatctatcaaattaggtgtgttcctcagctgtcccgataggcacacacctgtgcctgtaaataggcgcttggcggagattgcttccaggtgtggatctgttgggcgaccttgggatgtagggcactttggaaccttttcctctagcttcaggaattaacctctgggcttggttccatgccagcttgcattttgctttgggacagtaacatgtaaagaatatgcctgtgaatttagggttactgagaagtcctcatagaagaagtaaaatttccttgaggaatgggagtcttttattcaatccaggtttaatgcaaggcttggtgaacagctccagaaggttaataattgcgtgcgtgtgtgtgtgtgtgtgtgtgtgtgtgtgtgtgtgtatccttttgtcattcaaaagtatacgtatacacacacacctgtacagctgatgataaatatacattgtatcaatgagttcaaatgaagtgtgctattcattcactgaggaatgggctattataatgaactattatgatattagaaattgtcagggcaataagcaaataatacatacggttttcaacaaactttctaagtattgttatcagtgggtttgcttaaatctttttttacaaatttatttatttttttgagacgaagtctcgctctgtcgccaggctggagtgcagtggtgcaatctcggctcactgcaaccactgcctcccgggttcaaaagattctcctacctcagcctcccgagtagctgagattacaggtgtgcgtcaccatgcccatctaatttttgtatttttagtagagacgggttttcaccatgttggccaggacagtctcgatctcttgaccttgtgatccatctgcctcagcctcccaaagtgctgggtttacaggcgtgagccaccgtgcccaggcaatagccccattgctcagtgaatgaatagcacactttattttaactcattgatataatgtatatttatcatcagctatacaggtgtgtgtgtgtgtgtgtgtgtgtgtgtgtgtgtgtgtgtgtgttgaatgacaaaaggatacacacacacactcttattaaccctctggagctgttcagcaaaccttgcattttttactttcattacagtgtgtaaataatttagcaaattctaatttgaacctgatatcaattgagcatttaatatttagccaaatatttatcaagtgctgactgtgttctagatgctggggctgcaatttcgaaacagaccattgaggccctcatggagctcacaataaatgatcttccttaaagtatcaggtctctggtttgttaccgtattttttaaattgttaaggaaagaaaaaggccctatctttttgtagacaaacatgccctaagtgcttccagaaataatctccatcaggtaatgcagactgtgtgtggagtgaaattgagtccaatccatgatccagcagagtttcagcccaggatttctttagagcctttgctacacacaaagttggctgatgtgccattcagcatcccagcagctctttctcttcacactagcaatggcaaagctttgtgcggaggcattgctggctgctctgaactaaaagcatccgtggggaccgaaagaggtttttgcacaccttattaaggtaggcaagtgtgtctgagtgtgtgtgtgcctaaaagctggaagacatctgttgagaggaaagtgctcttctgtgggtctggcagcttttctgtaagtcttctattctgatgcaggagcgtgtgagcagtgggtgggaggagatgctttggtacttggaatgctgaggtccggattaagtggtattgtaatagctagttagaggcagaataaaaagctgggaatcaaagcatttaaaaatgcatccttccattatttgctctcaagttaaaccatattcattctaggggaaattaaaaaaaaaaaaaaaacacagcaagggcaagtagcccaaatctgtaaggtctttgagcttctctgttcgtccagcttttgaagtcttcctacagccaatttgtttggctcctctggagggggcaattcatatccacttccctctcctggagcatttctttcttctatactccatcagggaacaatagagtttaacagtaacaggcaattttttttttttttcaaagcttgtgccctcttctgcgtttaaaggtgttttttaagagactcctgctaggggaatcttggcgcctgtgtgttaagacggcaattaacttttagtatcagtgcttacattaaattttctctctttctgctttactaaagcagtcattaaaattcagtgtgagtaccatgaaactttatcataaaaccctgctttgcttagagaaccttgattgttttctgaaagcagccttctcagtttatatatacatagctgccttccttggaatatcaaattgctttgtgtcacattaagaaacactaggttgaacctctatactgtgttttatctgagaaaaatactactgcaaaaagtttgatttgttcaagttttaggatgaaaatttctttgtaacaagttatttgagttgcatactatgtcatcgtatatctctttagttcaagtaattttgcaattaacatacggttatgtaaagaagataatgatttattttttatttatatttttaaaagttattaagtgaggttttcctttcagtaagagtttagaaaaaatagccagaacaagtaactggacttggaagataaagatacctttgcacttctaaattttacctttgtacacttcggttgtgatttaatcattgaaatgcctctgctttgaagtaaatgcatcacttatggtgtatgctgtgttttaataaagggaaaacagttatgggttctctgttgcacatttgaatgttgttattttttgctgtatttaataacctcttttttctcttgtgaggtttactttggaaatgaggcatgttcaaaaataggctgacattcagcttctatgttttaaatttaaatgctgtctgtgttttatcacatctggaatgtgtggggagaaaagataccaagttttattatttagatttaattgtagaattgcagattgatatttttcaatgcattttcattatagtttctgccatggaggcagcgtgagggctttcaggaagatggagtggtgtaattaccaggtgcgcacgttcattaatccttcctggctagagaaagcttcaagttcttctccagtggcccattcgtaaagctataaatatctaaattgtgtcagccaagaagtcacacagaatggtggctctttttgagttcaatttcatgcactgttgctttggtcttgtgaggaaagctctgaattccttaggatagtcttggttgtgaagttccaaaaacaaaatatcaaatcattaaggatttaatttaaaatacatactcttctttcacaaactagatgattgcagtaatgtggattataaatttttttttttgctttatttctttagagctcctctttttattttgtatgatcaagattatagctgagattttggtgatttttttaaaaagatttatggcttatggtccatcagtctctccactacttcaaacctgtgtacccctgtatattatctgcagtactggaatgtttgcattgtatgtggaagctatatacgatttggtaaaaaataacacttaaaggtcttcgctaagagtgcttatttaatcattaaatatcccttaataaaaataattccagagatattgtctgtgtacaaacttaaaaaaagagaaatataaaatactgtgatgtgaataaaatgtatagcaatacactccaataataccattcttatgttttcccttgttctcaactgaaataactaagctaatagagacgtcagtaaggaatgtgttgtttcttcataatacaactacaaactcatctgataagaacaacctgagagtgaacgttaactttcctcattagaaagattcaatttaacacatatatacaaatacatttttaagataatgatatttgcagagtttttgtattctatggagtaaaggagaattatcacatattcaaagtaaaggtataaaatacatcttaatgttttacttaaattttaaagggtccaaaatatactaaaattgtttttctaattctttcctatgtttaaacgtgccagagtcattggaaataggacattctttttcttaagaagattttgcccaaaatatttaaaactattttcttttcccttgattttacaatttcaatattcatggatttttctactttaaaaataacagtagtttttatgatcttaaaacaaatgtttaagggcactttcgctctctggagactataccatccacatatttattatcagcaaaagaaagggcagggcatacttttatttgaagttgagtataaaaatgtgtctgtgtgtgagtgttattaaaaagataagtgaagagacaaatatagaatccaggaacattttcagcctggcttttactctctctaaaaatctaatgaaacccttgagcatctcttatctcaaggtacattaggaactgtccaacactatgatccgatgggagatcagtatattcatataaagaagaaaatttgttgttagtgaaagtcaagtcttttaaaaaaataatagttacagcatttgcaatatacaagcataatagatttactcaacgcccaccccccatctttaaaaaatcaatttccgacagttgtctactttaaaattgaacatatttgctacctggagggaacattgtaatgtagcccatatgtggtatgcatcctgaagaaaacctgaaattatagaggaagttatcctgccttctttcttctgttgaatgagttaaaatatattaacaatttgcctttcactttgtatttatcattttgtatctttgcatatttacatatacattcatgtgtacaagggcatatatactcacaggtcagggctatttaaacagctatttatttgaatatgccagggaaaatctccaagatataaagaagcagttattagatactatgtcagtatagaattaacagccatcttttttaagatggaagagaaaattaattaattacatacaatttctaacctcaagacattttctttctggagacaaggaatactgaggtgctcacgatagtgaagactcaacaagaccctaataaaatagatgaggataagtaaaactacaatagccaataaaaaacaaaaaacaataaaccatgtttcgctggcatgttggtgagtatctctgtaatatctgtcaataagggtctctgtagatttggagtaatgttcaggaactacctgtactagagaagacagtggagaggactccagtggctaaattctgctgcctttgcttccagaaatgtaaataataaggaggtattgtggcatttcctggaagcagtagtcttgtttcatggtctgactgtataagaatgcctagagaaacataacctcagctgactaaactcccttgatgattgtcactttgtcactgaactctgaccataccttttgcctccagaggcaaaagacgggtgaggaagtgatctcctcatctggtttttaaacaagtatataactagagaactggattatctcctaaacccactcttgtccctggaaaaaggggagtcatcctatccgtttcttagccaatttatgtatactcttagtttgagagcatgagaaggaaaactattttcttttcttaccttggctgggtttttaagaatttatttttagtttaatcaaaataatattttaaaaggtagtaagcctctcataagcagtttgatctgttctaaaataacttcaatttttctttttttaaactttcttttatcttacacacaaagtataatagtaatatgtactcactagaacaaatgaaacaggatggagtcacatagagaaatatatcatattctccctatcccctcccttaatattaacatttaggtgtcatgtgcttctccattaattttcattgcaaaggcctaaattttcttccaagagtgaggagtagcagcacggtagtttggacctgatatagctctctttccctagccttttgcttaagtgctttcctaggggctgactttacttacctaaagatgtttcaagcaagggctcacatttttggtagcagaagacacttactgattgctctcactaataattttgaaaggaatgtcaaaatctgggaggatcatgaaagaaatatcagaaatttcctttcagctgccattctccttaatactgttatcaataaattcagcatctcatatgtgatagcaaaaaaggtgctgccttttgttcttgcatcctgaggttcttacctaataccatggtagcaataaagatggtgagaaaattgcttcttctatggtgttcaggtcctgaacgagcaccctcacctccacagacggtggcaggtattcaagcattttacagactttggagttaaatatagcagtgttattctaatttaggtatgccaccaccagcggcaccggcaactgcaataggaaaaatgattggcaatgccagctatctgatgttttcatgtgccaggtgctgtcagttcttcacagtattacattccatcctcacaacaagagagtgccagtgagtgttgctgtgtgccagtgcccaggctaagggctttgaacacattaccctgttttatcctcataactttccacgttatttttattcctgaatgaagaaacaagttctctgtagagatgctgtcattgatccactcatatcctttcacatccgtttaacattttccctgctgtgcttttactcccaacaactagctccctaatcgctctgttggagggtggccttgaggctgccagagcctatttggtctgtgtaaagagagagatggatctatcctggaatttatgtccctgtgtgtgggaagcccttaatcaatgactgctggttgcagacacataaatacgtgagctttcttgttcccaactgagaaattcagaagtgtgaatggcactgccaccctgggcttttatgccatatatgtgtttggtctgtttcccttcccaatctcacttcattttcccttaccagtgtttcttgaaaacacatcccattagatcatttttgcatgaagcttcatctcagaacctccatttagggaacccaaactaagatattctctaaaatagaaactttattgataaagtttccaaactgtcttagtagatggccaatataagaccaagccaaatctttctgggtccaaattccctgtctttaattaatagactccattacaacacattcttcaatctttagtcagcaaacacttaccacgtgcctattttatggcatattatatttataccatagttaggatattatggttcatgaatattttatatctgtacacctgaaattctattgacctctctgggccacagttttgcatctgtaaaatcagcacaataatgctacttatctcatagagtagacttaaaaacgaatgaaatgatatatgccaagtgttgagaatcacaattggcaattactcatgctcattaaatattagctgtttttatgagtattgtttcattttcggtgcataatatcctatgcaaagaacaaaaggtattggtataggcattgaaacttgaagcatagaagaaaaagttaattaaccggtgccccactagatgcctctaactgctggctccgtgtatccctttagccttggctcgtcacgagaaaaccttggagacatttctgctggactcagcagatcaatttaagaaagatgaatgacatttttcttgaaatgtattcagtcatagctgcctttttctactttcatattttggagttcttagaaaaaattaaggactcctttttttaaagaaaatggtataaaagaaaatgcatatcactttgtcactttattattgtaacctcatcaaagtattcagtgtaaagacagtagccaagtgaactcttcttgtaatgctcggaaaccattttagcaatggtaaaattgctgcaatttatattcgtcaaattgcatgatttgacttattttagaaaagttattaacttctgaagagaatgcttcagaagcatttaaatgagtacaagttatcaccagtgatatacataaatttcatttcaaaatatacttctagaaactgtacttagttagctatagtatttgtacaaggattaattcctatttcattttgtaggaatttatttatgaatgtctatggcctgccagtgtaaagcagacttagagcatcatcttttacaataatctttttttttttaatcaaaggggagatattctggtaaaacaaaacaaaacaaaaacaatagtttattctgcatttttattaagtccctctgtaagtcatccctgaaatgggatatgtagagtcttatatttatttatttctcagaagcttattggaggtgatatgaaggattttaagaccctactaactaacaaaacaacaatttaaaattaattttcaaaataccttaacaaatcttattctccttattttcaaattctttaacaatgtttttcttattactaacataatatcttctgatgtagtcataataatatctaaaatgacaggtctaagtaacttacatggattaattgagtcttctaaatagtaaggtagatggcactattacttctatatgagaaatgaggaagtagaggtataaataagaaattttttggccgggtgcggtggctcacgcctgtaatcccagcactttgggaggccgaggcgggctgatcacgaggtcaggagatcgagaccatcctggcgaacacggtgaaaccccgtctctactaaaaatataaaaaattagcctggcgtggtagtgggtgcctgtagtcccagctactcgggaggctgaggcaggagaatggcgtgaacccgggaggtggaggttgcagtgagccgagatcgcgccactgcactccagcctgggtgacagagcgagactccatctcaaaaaaaaaaaaaaaaaagaagaaatttttttgagtgtatacagttagaaaatggcaaaatgggaattcagacccaaacagtaagactcaaggatacctttcttatcagtatgctaatatgaaaacctaagcatactagaaaatctaagtgccagttggaaaccagaattaacattttggtgtgtaactttctggctgctttttctatgctaacaaacatatatgacatacaaaaatacacacatacacaaattcctgttcactacttcttttatgttaacatcacaatgtaccgtacacagctgtattattttatatttgatttcatattttttctaaagtcagtgtatttgtcaaatatcaacttatctatttaataggaatatgggatgatctttgcttatacatacatacatatgtatataaaaacaaaatcaagtattttaagcgttcaccagaagtcatatgtcaatcagtaaagtatataattttttgctgccaatgacatatatcataaaaacgctacctatcatagaatgaaaatgaaacacagcaatattgggacacctattctcaagcaacagctttgtgatttattagctatctcacatgaaataactcattaacttggtattccaagcagcaaaagaaggatcacttaggtcacttgcaaaataatacaaagctaggtttaggggtgggttgcgcttggtgggatgtagatgaaaccatatgggcccttgagtttataattgctgggatctgcatggtgggtatatggatgtttattacagtatgctagtgagttaagaaagaagaggaattattattgacttacatcatagagtttatgcaaaaattaaacgataatttatttttaaactctagaggtataggtaccatcatgaagggacccacagaactgatgtagccagtaattattggagctggaacagatactctgctgtcagttgttctggttttgtggtcattgttcttgcctttgcaagttaccaactctaagaccttgggcaatactttaagtcttggttgtctcatctgtaaaatggggagagcagtaagtgtcttaaaggtttattctcatgttatatgacttacggtatgtaaaacatctgcgtttagacacatagagggtgcttaatggatgattgctctcattattaggctacatctaatctatgaatttaaaaactgtatagaaatatgtgacagattctttaagagccaaataccaactacagtgaaaaatacttaacacttgctgagctcttagtatgtgtcaggcttaactaccttaatgctcatagcaatcctataagataggtactcttgttatcctattttatatcttctaaaattgaagcaagggaagttaaataataggacaaagatcatacgctatctatccatatatacccatctggctgtctacctgtctccttccatccatccatccacttattcatctacccatccatccactcagttacttctctctctcccaccatccctttccctttccctctccctctccctgtctctgtcactctcctttacttatctatctatcgatggatcggtttatctatcatctatctatctctatcatctatgtatagttgttaataacactaacattttataaattacaagactgaaaaatgttttcattaacttatggtaacaaaagaccacattgtgaataaaaaaagcagtaaacacaggtctctgcacatatgaaagagatgtcctaaacaggaagagatgtcctaaacagtagggatacatagtatcatacaatcaaaacatggcagccctataaaacttacaaagcaatttcatgtaagttatttcatttgactcttaccacaatctatgaggttactatttttatttttctcattttacaggttaaatttaatatggcttccaataaaaaattagtatggttaataaatatcttgacgtcttgctcctataatcctaccgatagtttacagtaattagtaaaataaaataataggaaaaatacctttgatactagtattaaattataatcatatcattaggtaatttcaatttgtgattttcaagaatctgtaatatggtagcttcttcctactgacatgtttgaattcattttaaggcttataattcacaagtaatctatatattatctaaaatgtaaatgcacattcacatggagataataaattagcgtgaaatggctgtattttgctctctataatttttaacatacaggaaatcactgttgtctcaaaaatcaaggaaatatagtatttgaggtgaacttattctttctactattaacacattttaatatagttctctcacagtgcaacagagcaagaagctttcagacacatttgctgctgcaaggagcatgctgtgctgaacttaaaacaccttccctttcaaactccttgggactgtttttttccaagagacttcaaatgcactaaatttagcatccgttggaggcacacccaggcatattatagtgaaagccccaataactgaatgtgttaccactattcacaatgtttatgtgtgtatatgccttatctatgatgtattgcaaattacaaaaattgtgttattattcacagtaacaaaaacacttccagcaaatttctaacagtgatctcttttgaaataacttacatacatgtgtcatgggtcttaaactttgtcacttttatgtttccatcatgttgttttagccagtgagggttttgtttggttttcatttatgattatatactttcaaaaaatagatttcaaagtgtgaatttgattgattgattgactgattcattgagacggtgtttcactcttgttgcccaggctggggtgcaatggtgcgatctcggctcaccacaacctctaccacccaggttcaagcgattctcctgcctcagcctccctagtagctgggattacagatgtgcaccaccacgcctggctaattttttgtatttttagtagagacaggggttcaccatgttggccaggctggtctcgaactcctgacctcaggtgatccaccctcctcagcttcccaaagcactggaattccagacgtgagccaccgcgcccagcccgtgaattttatttttgaaagacaagaatgtccttgcctaattgcataatagtttaacatcatgaagactaaatatgctttttagccatgacaattttatttattattgttttcatttttaattttctcaaagatcctcatcagtgtactctttttggtcttccttataagcgtattttaacaggacataataataagataaatcccaactttttaaagttgtatccgtatgtattactttaaagtgctattaatataaacgaattagaggcaacttttattcaatcagattttaagtaattttaccaaaaatatggccttgataatgtctctgtaacaggttctctgtaatatacatgctgaggattggtttgtctttgcttttgatactattttaattagaaaagtaatggggaatccagacccttctcatttaataatccagagaaaaatcagtccatgttctaatagtttaaatttttctactaaaacccatgtgagaatccatatgagtggaatggagaggagttcagcttcaaagttggcagatttgagatgattctatggcaacagaaatgtgcttgagggaaatcagttgcggcatcttctataattgtgtcacctagattttgccttaggaatttctagatttccatagaacattgtgacctcaaatgctttatcttaataaagaaataaaagcagattagaagaattatttgcctacagtttgtgggagatgggcaagtcttaagagtttattaggtacccagaacgaaacatattttcttgggcctcataatcacattgaaatacaaggatttagttatacacagtgaccagttagtgaatgacagtcttcagtatctagtagacagtaaacatataaagatgtatttgtggccgggcacggtggctcacgcctgtaatcccagcactttgggaggccgaggcgggcggatcacgaggtcaggagaccgagaccatcctggctaacacggtgaaacctcgtctctactaaaaaatacaaaaaaaaaaaaattagccatgcgtggtggcgggcgcctgtggtcccagctactcgggaggttaaggcaggagaatggcgtgaacccgggaggcggagcttgcagtgagcagaggtcaggccactgcactccagcctgggcgacagagggagactccatctcaaaaagaaaaaaaaaaaaaatgtatttttacttttaactacagcgagagaccctggcagcctacagcatacaattagtgttcattatttagattgcatggatttaatgtgaggggtcaattacttgtctaaccagtgagcctagcctcttgctcaatactgcctgcttcatgagggtgaactgtgctggagaaatatattacaggattatctgcagattttttttaaatgagtggttaagtcaaaagttcttgtgaaaattcagagtaataaattattatgaagttgtgtaactaggtaaaggatagtttcttttacacgggtaaagattaacatgaggaggaaaactttagcaatggcatttaattccattcaatatatttatattgagctcctttaaaaatacagggccttgtggtgggtgctgaggacagaacaaaaaccaagtaatacatgaacataacccttgatttcatgatctagtagacctataaaagttgtcgatatctgatgaaaagaaaatggtaaagatattccaaacagtgtatgcaaatccagagataggatggaggggctctacctgaaggatgatgataagaaaaccgtgttgagtgaagggtgatttgtggaattcagataaaatatcagtcttgaatgctgagtgaatactcaatgattgactagatcccatggacagtaatttcttcaattatgacgatgctagtgtttatgactataactatcattctccatgccaggcactttgccatttggtaaatgtatagtgtgctattctaacaagcatgcacagagcttttactttaatgtatccatgagtttattggggttcagaatttaggtaagctttgcaaggtcgtagcatggagtaaaatatctgaaattcagacccatatctaactaagttcaaagactgtacagatatttctcctcctttgtgcagagaaggataggaatggttccatattatcatggacttagtcagatgttttaaaattataatgtcctgtgttaatgaagaagggatgatattcagtgcatattcttaaccgttactttgcttaatgctctcgacttttctgtgagatggatagtgtagataaaatccccaaggggactcagcaagtgcaagtaaaacaatgaaactttaaagccctttgtcaaaacctctctttttctcagaggatggaagggccgtaaaggttggtgaggaaggatggaccatttcctatgtagtcttctgacaatattcaaacaaaaggagagtcagcaaatcccccttgatgtgggaagttttaatacaatttgcagagtgtctctctggagtagacatcctcctctgcaatcgtgtcttctatatagcctcagggctttgggtaggtaatcctctccaaggagagtcctggagagggctgtctaccccccttgcaccatcctctaacattattctatagctcagctccttgtttctgtttcctgccttgtttttgtctgagtctgcaattatgatgtaagcaccatgaaggaaggtatgttgccagtgtttgcatcagcatatcccccgtgtgtagcagcgcaagggatatagtgagccctcaatgtctatttgtagaaaaaagaatgaacgtatcaacgaaatctgatacatattcattgtgtctgttatctccatctctcttgtcctgccttgttatcttgccattttcacaaaaggccccaaggcccatcatttcttgtgtaacttccagagtgttaatttttaaattaaaattaaggctttctacatgagtgtctattatttgagaaaccatgcaagatcgtgtgtgtgtgtgtgtgtgtgtgtgtgtgtgtgtgtgtgtgtgtgttgcactctatattatattgaattctggattttttcttataaataaaattttaaaaatagttctttaaaaataggaataagatgttttaggaggcacagagagcaaaggagaataaaaattgcaggtttggggttgtgcatactaattgccattgagtaaagagagcacactgaggccatttagaagagaattaacgtgttttgtttttgtttttgtttttgtttttgtttttgtttttgttttgagacggagtctcgctctgtcacccaggctgaagtgcagtggtatgatctcggctcactgcaacctccacctcccgggttcaagtgattcttgtgcctcggcctcccaagcagctgggattagaggcgcccacaaccacgccaggctatttgttttttttttttgtatttttagtagagacggggtttcaccatgttggccaggctggtctcgaactcctagcctcaagtcatccacccgactcagcctcccaaagtgttgggattataggtgtgatccactgcacctgaccttatttttattcatttaaaaatattaaatgttactgcatagggagtaatgggcttaacaatgaggtgaccaaaactcctatgtaccatgcagagcaatgtatcaaatgtttttaactataaacttctcaaaaacataaacctaattgttctgcagctgcaggttatatctgccttgtttgagcaaaatttggtggtgaaaatgccttgcttccatttttccttcaataactgatatggtttggctgtgtccccacccaaatctcatcttgaattctactcccataattcctacttgttgtgggagggatccagtgggaggtcatttgaatcatgggggcggtttcccccatactgttctcatggtactgaataagtctcacgagatctgttggttttatcaggggtttctgctcttgcgtctccacattttctcttctgcttccatgtaagaagtgcctttcacctcccaccatgattctgaggcctccccagtcatgtggaactataagttcaattaaactactttttcttcccagtctcaagtatgtctttatcacagcatgaaaacggactaatacaataacctatataattttgaaaagtacttgtctaatagactttcacaatagaaactatatccttatcaactttgaaaagtcattgcttaatgcctttggataactgaattttctaagattattttaattttgaaagttaaattttatcccagtgttgacgatttttgtatgctacttttaaaatattttgtcagtgatttatatctatggtgcaatcttgtaaaaaattaacaatgcaaatgtggctagaccatttaaaaatcaatatgttataattcagcccatttaatcactttagttaaacatcttaggaacaactcagttccatttgagagaagacacagttttctagatgtgtgttgtggcatcatattgctttacaatatcttacataaggtgaattcaaatcatatcattgaatctgttttaaattctgtcatagcttaagattagtgactaaatattggcaggtttatggaagtaggatgtaaacaagacaaaaacaagggtggaacaagtaattttagtatattattcacttgcacagagaaaagtcattcacaccttcttcagctttgtgaagaaaatagactaaaatcctgttgatatagcaactatgttttccgtttcttgtataaaaataaagaaaacttcctattaggaattagccagacattttaattttctctcttctttctctattttcccttacagtctctttgaaggcaggcaaaatttctataaagttttaagaatgttttaagatttttttattgtgaaatattcatagactcacaaggagttgcaaaaacagtacagagatttcctgtgtatacataacccaactttccccagttacatattaaccaaatacagtatattaccaaacccaataaactgacattggcacagtgcaatcaactagactgtagaccttacttggatttcacctgtttttgcacatgctcttttactgtgagtcattatctgttattctatgacattaaccatgtctatagatttatatagttactaccactatcaagataaagaagtgtttcatcaccacaaagtaacttaaaggattatttttataaagtaatgacaaatgtgtcaaaagccattcctgtgttatatagcaagtatgttttgagttattaaaactcactgatcatgtctttcagtgtcataactttgggtttccctccctaactataataatcctgatgaattacagttgatgaatatgagaatatccaactcttcctgactctataaatatattgactgagattgtaatatttatggtgtcttaaggggcgcttgttttattatgatgatgtgaacatgttgagaatagtaagaacagcccagtttagcaaacaggatatgagtcttctatatccagctcaatcgttgccccaacaggggacatctgcctttgctacttaattttccattctggaaaatgtgaagtgtatgagaatgaataatcgtctccgattttccagcacataataatctgaggagagcaggtacagcaatttaggagctgttttcttttggtttccaaaaaaagttccgtccagtggtctaagttagtcgtttactaagtgatagagcaattggctatgctttttgaacggactgataattatgtggatgcagcaaataggatatagacaatgcatctactccattacagtaaaaaagactctgatagcagttaatccacataccaggcacttagcttaggcacagttggaggaaatggaatggtaatagactgtagtatggcatgacaggagctgtagcttgagattcagaattccaactctgcctctcaatatttgagtcctcatggccaagatatgtaaagtgctctgtgcaggtcttggcaaccatccaccacacacttagtatgcaatatctatctttattagtcaaggatctggaaagctagttgatgagacaaatgatagaaacaagagttcattagatgaaataaagtaataaatgatgcaagaatttaaaaaagatttagagaaggaaagggaacagaactcacatgcaagtagagcaactgtgtatcagataatgtgctagctgagttagaaaccatgtctcatattaccctgaaaataattctgcaaagctgtaggtgttatttttttcatttgacaggtgaattcatgaaggcttgaatatagggttaagtgagttgtttcaatgtagttattgattcaaatcaagatctgaatgactctaaatatggtgctatagagatttgaagtaggataaataggatttgaaaaaaagaaaaaatatatagggaaaggaattggtacactgtagcagtgtcataaatgaagcttcagttgtgtgattccagatgatgtatgtgaggcctaatcaaacagctttgtggaatcaaaatttctgctcttgtctccaactggggacgagttggctcgggattaaggtgggcgaccttgggaagactagagtctaagcaggactttagtccctcataagaattatatgaggatgtatatttgcatacaaattcctgggcccaccgagatctgccaaattggaatgtgtggtgatatcacccagggaaacatagagagctgttataattagtcatgaaatatttagtactgaaattatagattatgttaaataatcacttataggggacatagcagggttggcaggttaaccatacagcaaacagggttgtaagtcagggcctagagaattttcaagaggcaggaattctgcagaatgaaggcctggtctcatgcagcaccatggacagctccgaggcactcttgtttctccaaaaacctgaaatcaaaaactttgcttttcatcatgcaacatacccatgtaacaatcctgcataggtactccctagtccaaaattaaagttgaaaaaaaaaactatactttcatttgaatacagttctcttcggctttaccagctctactctggaaggaatatcttttactcaatgaaaggccatcccctgttaatgcctggccaggttctccttatcagtcattcactatctttgtgtgtgagtgactaaacatataatgctatgtttagtggatggagtaagattacctttgcagaggttgtactggcttacccctttggttcttgtagttttcttctattagagttttttccatccctaggtttctatactgttcaaatgggtttaagattcttgaaggtattcctctgaccttgtaatttatgcttgtctcctagcacaacttttttttgtaaaggaggcaccaactatgtggtttgctggcgatggcatacacaaatcaggtgggaggaattaatgagagcagcaattccaatatctggttcttcaagattaacttgtatagtttaattcagcattctaaataagcctcatagatttaaaaatctagaataaacccacatttttaaaaaaagttttatgttatctgtgctgataatgcacgctgtacataataaaatattattttcttttttttaaatttattattatactttaagttttagggcacatgtgcacaatgtgcaggttagttacatatgtatacatgtgccatgctggtgcgctgcacccactaactcgtcatctagcttaaggtaaatctcccaatgctatccctcccccttccccccaccccacagcagtccccagagtgtgatattccccttcctgtgtccatgtgttctcattgttcaattcccaatattattttctaagtggcagtggaagaaacatggaaagttctacttcatccatcggtggattagaatttgtataccatgagatgattaattttcaaaaccagtttgaatctcacaaaataatgaccctgttttttgaaggacaaggcagaacaaggaactaggctgtgccacgttcaagtcacaatctctaacatttgttttgttttgttttgttttgttttgttttgttttgttttgtttaatctctgttgcttgttcactttctcttgtaatctgcattgatttgctacctggctatttgtagattgacttcggctgccaggaatggaatgtttttcataaaggaacatatgccttaatgaaagtaccataagaagggagtagagtgtgaccaattgcctaggtaataagtagtgacaacaatgatattattctagtataaatggaatcagtttttctttgcccagggggcatgataaagaaggcctggctggtatatactaggtgggacacaccaacagtgcctagaatgtcaatggatcaaacctgagggaaccagaagttgaaaagacatatcccaaaagaaagcatttgatgtttaagggttggcttacttagaacacaatgaaaaatattactaaaattaaaactatgattttagctatttttaaatatgacaaattaaatagcagaacattttaataaaacattacttaaggtccacaattttctgtaagtctaatacatgggtcattaaaataaaaaattccccatgatttatggaatcagatttttttaatacaacgaattctaaatggttttataatgccaattccaattaatatcctaattataacatgtcatccagaagggttaatgactaaattttattaatatttgttttctatttattttgatttgtgcagtttatgtgtatagtaacgatagctgcaaattagataccattagcattaaataaggtatatattttaatagaaaattaaagttaagtatttgagctagcctaaaatattcaacaacttaaatttgttttttgtggatcacatttttttgagacaaagtcttgctctgctgcccaggcttgagtgcagtggtgcattcatggctcactgcctcaaccatccaggctcaggtgatcctcccacctcagcctcccgggtagctgaggctactggcgcacgccaccatgcccagctaattttttgtatttttttttagagatggtgtttcaccatctggtctcaaactcctgagctcaagcaatctgcccaccttggcctcccaaaatgccgagattacaggcgtgatccagtgcactcacccctgtgaaccaccattaaatagctaataaaagatgcatgtcaataaaaataaacaacttactagaatgattatgtgaaaatcatttattcttccaaagcatgaattttcaaacacaccttttgttactgttttaagaagggaatcatttccatatatttgcatgtaaatcacttttagtctcagagaactttccataaaagtttttttattactgctgtaaccgatagagctagtggactattaatttaaaaagctgtacataaaaacacatctatagctcaaataatctaggataccttttagtttggggaaatgtagatgaaaatgaagtaattacagaatccttgttaattttcagatttagacagtctaggcaatatctttcaggaatgaagagatatgtgttttttggcatcttggtagagtatattcccattgtaattcttttgtgaagtctagaccagatgtggccataaaaatagacccctactacaataatatatttcatagataatccaataaagtcaaatcttattgcagtaggcttagaactctgtttgcacccatggaatttatatcagtttttggcaaatcctttcatctctgaggatactttttcatctcacatataccctattttctgaacattttgccttcaaagtatacctcatttatcaagaatttctctttattcatctgacttatacaagtggcaataacaacgtctggttcccatgaagtaaccagtgaccctttgaaataatatagcgctggaagaaagaaaaggaaagggagactgatcattcagcaactctttaaaaccatgtcaccgttaaacacatagtttattttatcttttttttagaattgtgaaaacctatattagcatcttcacggatgtctcctttgtttacatccccgcttctgtgccttgcctgcagtagaaaaaaaaaggacatgtgtatccctattccccattgtcttctcattctacatgagaatgagaattcttttaatttcttctctatctacatgaacccacttccattatctgtttgttcagttctttaaatgccctgaagctagctctgtgactgggcagttgaaagttctggacttagcatcaggttaatttgaaaaatacttattgagccaccaccatatgtcagccactactgtagatgttttgaatgtgtcagtgaacaaagcagaaaagatgtatgccctctggattcttgggggtctcaaatagtgaaagacagatacgataagtatattgtatagtatgttcaaaagtgataagtgctgtgaaaaaaaagaagaagggtaaaataagagatggctcatgctggagtacattccaattttaaatagggtatcatggtattcttcattgagaaggtgacatttgagcaaagatctcaaagaatgaggcatggggttgaatcatgtagatatcagcagtaaactcattttgggttcagtaaacagtcaatgcagaattcctaagccatcggtttatctgctgtttggggctggttatctgcagtgtggctagagtgaagtaagtgagagaggtttaggagagaatgttagtgaggtgagggtggacctttgaagccattgtaaggacgtttttctctttctaagtgtgagaagatgatgctgactgagaccagggtgataagaaatagtcatattctgaacgtgtttggaagtggggccaacaaggatttctggatgaattggataaggggcatgggagaaaaatggagtcatgaatggctccaacgtttttgctctgattaactggaagggataaagttgccctaaactgaaataataaagactatagatagaatggggcgattagggaggcattaaatttggatatctgttagacatatcaccagatatattgaataggcaattgaataaatacctttagagttcagcaaaaaaggtccaggttggacgtttaaatttcggaggtgtttgtataagataacatttaaagctgtgatatcagattgtatcactaaggaagaatatagatagaaatgacaacgtgactaaggactctaacattaagaggtggattgacaaaggagaaaacagcacaggataatgaaaaggaatgatcagccaggcatggtggctcacacctgtaatcctagtactttgggaggccgaggcgggcagatcacgaggtcaggagttggagaccagcctggccaacatggtgaaaccccatctctactaaaaatacaaaattagctgggtgtggtggcacacacctgtagtcccagctgctctggaggctgaggcagaagaattgcttgtacctaggagacagaggttgcagtgagccaaaagattgtgccactgcgctccaacctgggcgatggagcgagacttcatctaaaaaaaaaaaaaaaaaaaaaaaaaaaaaaaagaaaagaaaaggagtgatcaatgagatgggaagaaaaacaaaagtgtgtggtgtcctcaaaaactgacgttctattttcaaaacctacattttgggtctccttttactatatcctgactttctagctatataaccaaaaggagaaagcagtaatttttttagatataacatgttaataactctaagggtattcaatgaatctgaataattcagtggtataatgtgaaaaaatatagtattcataggaaaaggaacagaagttagctcaggaaatgacttgaatgaacaccgaagccaaatctccagcgcaggtccacgtattatttgtctcagtggttgaattagcagcaagattccttagtaggatgaaaaaagatgttgtgagcatctgtatctacatgactgaattaaattcctccaacaatgaaatgtagttaacgtagtatctcgaaaagaaccctaagtggaattcagggaacctaaattccaaccatggttttgctgctgactgattgcattcacttcaaatctatcattaacctccttgtgcctcattatcctcatttcaccaaataagaaaaatgaaatattcctccttccctacctcactaggatgttgtggatttaaatgtgtgagaagtgcttgagatgcataaaatttgatggagtgttttattcatgaattcaaggcatctgaagtaatttgaccatgatggacagttgcttccttgcacattttttagagtgacatttccgttactgacccacccatttatgcaacatgttgcctaatctaaatttaggtcaaaacaaattgaccttataggtaagcattatatctattaatattgtatttttgtattattttataatattcatcattcacctattttctcatgcaatatatgttactgaacacatatagattaaaaagccttcatccctaaataacaatgatgggaccttccatttttatatccctctggcatttaaaatgtgcttttatagccatcatctccattgatctctcagtcccttgaggttgatatgacagatatgctttttccattttaaaattacggaactgacagtctcagatgactttaccctccaactactgtgtgaagaagcagggtctggcactgaggtcttctgacatccagtgtagagcactatacttcacaatatggccattggcttactttattacaagcactaaatattttccactgaatacgtaatacctagaggagaatgtcgtgtaaaacagcagcagtagaacagaggattaaatgacccattttcttgaagttatcttagttttaaagggttttttcttcatcactaatgaccatccctgactaagaaattattctcataatacatgataatatctgcgttttccaatgcgacaagaatgttaggatgtctatacatgatcttgacaatccctagctccatcacaatgtgtccaaattcattttatttggctagacaggcatgtagtcttactttcaatggttggctctgctggatgctatgtgatctagaacctgtcacttaccccttctaaacttcaggaattttttatccttaagataacaagaaaactcgtacctgtttcaaagagctgtttgttcaatcacctatccattgattatcttctatatgccaaatgtttttctaggtgctgaattacaggaatgaatcagaagcaaaaagttcttactctcaaggatcttatatgctaatgaaatagatgttaaaaaataacaatttttgtttcattttattttattttattttgttgagacagagtctcactctgtcacccaggctggagtgcagtggcacagtctctgctcactgcaacctctgcctcccgggttcaaatgattctcctgcctcagcctaccgagtagctgggattacaggcatgcgccaccatgcctggctaatttttgtatttttagtagagatggggtttcaccatattggccaggctgttctcgagctcctgacctcaggtgatctgccctccacggcctcccaaagtgctgggattacgggcatgagccagcgcacctggcattaaaaagtaataacaatttttaaatatcaatatgtcttatacagaaaagtgagcagtgtggtagagtgtaactggaatgtgagttgagacataacaccagacagagaagccagagaaggacttttgtttgaggaaatgacatttgaaaaggaacctgaatagtgacagaggcagatacctaaagaatatgttccagacaaaggaaacaaaaagcgtgcaattgcatagtcaacttagcctacttgaggaaaagtgtgagtggattttggtgatggagaggtaagtgccaggagatgaagggagagatctggcatgcatcagatgatgtgcagtcttccgggacgttgtaaagagttgggctttttttgtttataaattaaatgttaagccattggggtttttaaccagaggagttatgtgatatgatctatagttaaattatgtttgttcttggatggagtgtgcattatgggaatttatacagaaacaagatttcacatatatatatatataaaactcagtgtcaatagaaaataataaaaacaaattttatccattgataattctggcattgatagtagtgggtatggtggtaataattgtgtgtaacactcaaactttctgaaaacctacacttgatctgtaaatccaaaagtatatgtagcaaaagccataatctgctcttatttctgcaccacttgcaccagtgtggagtgataaggcaaattattcaggcacctgtgtaagccttcagtgtcctcacccccttgttataactctccactaatattacattggtaaagacgtccctgacctatatgtcactgagacctcaaagaaaagagcaaagctaaagcgtaagggggaaaaaagccagcttaaaaagacttaaaggtttctgggaccaaaaaaaaaaaaaaaaagtctttgaaaaatgagaaaggaaggatagaagaaaagattctcctttggtcaatctggccaacctttggaaataaaaagtattgtgttgcagctaataactatttgtcactgcaggcacttgctgatgtctgccctttaaaatgacccaaactcgttggcctcgaaatcagaagccaaggaaaaaatcttggacataatgttttctgtagaattaccaattttctctctctctctctctctctctctctccctccctctctctctctctctccatatctatatatatatagatgtatatatattttttctgtaggaactaccaattcctatctatagggactgattgagaagtcccttatagcagtttttctttggcttttaggatgcaatgattattggtgagaataactctttcatttcacatttgtcattggcttatttgaatgtaatcctgattcaatcgttatgatctcctttaagtaggaagagaagctggtattacattgtaggattttaattttgtactcatgaaacttttgaaaaacattactcatactcttctgactgtcaaattggcctctaagaggtccacatctcaagaggtatcaagcattggtaactattttttggtgttgttttctcatcataaaatgtacttttattaggtgactttggaaattttattgaatcaatgcatgacactgcctcattctagtaatctgatgaagcaaagctgaaaaacaaaatttgaggattgtcagtatatatacttttatttgcagtcaagagttatgctgcaaaaatggtttattgaagtaacaaaattttagctgatatattaatctgaaagatacagtatacatttttagtatggaaaagatgaggaaaaggaggttctctttcctctaggtatctagagcaaactgtaactgtccttggtatttaatttttggctaaggtactgagattagaggtggggccttagatatgattaattgtcagactgataagctagatatttcattgagtttctgttgtgctctttctttcagatcctctgttcgatgctttgttataaagatttgggcatttcaaaatcttctccatatctggtgtctttccaaacagcaggtcatagactttacacaaagaggaacgacacaggttataagtagaagtgttttaaaccctgagttcctatttcagttttgctttcttaaacatattttccttatgtgataaatgcgagtgttgaatggtgataaataccacccataggctttaaagcctaaatgttgaatttgacactgagagtttaaaggcatcatgaaaatttctccagaactaatgttcaagcaatttaggttttacaggcaactcaatagttttgaatgatgtagttattttgaaaaagtcaccataaaacgctatgtttagggaattggtactttgcatttatcagaagattgtaaatgtcaatcgattggcttgctatttggaatataattttttaaattatagttcaaatcattaggatttaattcatgattttgtactacaaactaaatctatgaaaaatatcagatatttattttaaattagaggcatgtaaaggaaaatataaattttgaaatgccattttactggatttttctcttcagcccaccctaggcatttgttacataaaatatttctgaggaagtcttccactgattttgtaaacaaacatgttttattgaacagttctttgttgactagattaacattgaccattgtatgcaatgcattctcaaaatcttagaagctggttttctttttaatcatataattttacttgttttacagtgaaattaatgcatgtaaaaagtatacctatatagaaagttaaaagaatattgctaactagttactatacttccaaattgcctattttctgtgtcttgcattggacagtagtgattacctctaaaagaaaatggatggtctttgtttcattgaagggatggataatggacataactggcattcttgagcaatgcaattgcaaatacatgtctttgcatttatggtccaatcatcttcttactatgatagcatataattgaaggttcaaataaatgcctcgtcccttcctgtggcatattaaagagaaagaaaaattagaaatactttcaaagctacctcacatactaatggtagagttgtttgagtatttaggtgatttaacaaagctgatgtattttattatgcttgatcattgaggaaaatttatttatcggaatgcttttgagagcatatatattgtcagagataaacacagctggatattaaagaggtaaaaacagattttattcaatacctcgtgaaattaggggagagctgagatccattctaatttgtgcagaggcgacttggttgttttaaggcaagaaggagggagaaggagtgggggttcattcgagttagagaagtaaaaaagtacaaagggctggacagtgtaaatgtgattaggccagctgtgttagctggaagttattgaagttaggattctatcttcccacagagaacaggagacagaggacttatccttcttgatgatgtcatttgaaaagaatggctttcaggtccttgagtgagagacacttctgatttccaagagctacatgttcacaattgtaagcccttttgagtaaatgttctaagaaacggaggtaagagtcctatcaacagatgtgtgttggctagaacaaacattaaattttcctggcagcactgagctttctcaagcaggcacttaagggaaggctagggtcatcctagggacatggccttctggggctagaaaccatactagagtttagtcaagtcttagtgcaagggtttggacagagttgttaagtgctgagagttctgtatttctcactgtcacaaaggaagatcagaagctcctgatacttttttcatcagtacaattgaatatataaatcctatacacaaaaataaactaagcttatacaagcatattggtcaaggaatgttgctggccttattaattagatagcccagttaaaagaagaattttttaatataattaatgttaaagtaggatgatagtatataaaacgtgtctactgtcctgaatacaaactaaactgtttggtttagcatttacctcaagatctcttaatatcccccaaagggtccctaaaaccacaacttatctttgtgctcatgaagtagagaagagacagttaatagacatttctagctgatagactgttgtagagcagagaacgctctgtgtttttgaaaattaaacatatgaatttgcccctcttcccctattaaggaagaagagtttcttaattgtgcgaacacatcaagtgaactattcaattagatttttgtgacccagggtataaacatctggttaaggttacatatttcaaaggaacaaaacactagaaactcttggttttaaatctcatggctggaggataatttgcagcagagatttatctggcaagcatacagaattgctgagactgttctaaagatgtaagtgtgggtgtttgtgtcgtgaaaatagctgtttacatctattaagtggataccgatggttgaaagtgccgtctatgtcaagtttttaccaaatcaacttttgcctcactgtgtcagaccattttacctaatcaacttggactgctaatgtcctttcccctggcaccactatctgtctcttttgcaaagcacagaaacggcatgcatgattgtagtttataaaacacatgtaccaatgtggtctacagcttctgttgagttcgagagggtcagtttctgtaatctcttctggcacagagtcaagaacagcttcactttcctcctgctacctctctacccgtaagtgtgaacccatcactttgctaacactcaggaaggggattacacaaaatagagcaggagccctctgacctgaatatgcatctgagccctagccatagagcttctgattcagtagatctgggatggggcctaaatatttgcatttttaagtgtataagtgatgctgatgctgctggttccaggaccacattttaagaaatatcgataaaggtggagaattaaactgcagctcagaagacctgagttcttgccccagcttgacttttacaatctagcaaatggataaaactcgcaggacttcagttctcttcatctacacagtgagtggttagattggctttgtaatttaaaattaaacagggtttgattctgattcactacacaaggttccaaagaaggaatgatatctcctttcatttcttcactttgtcttctgtccctaggtaatcttatctatgttcctgatttaacctaactaatgtttctgcaaagcttctaatatttacatctccagccctgaaactctcatttgaatgctagtcttatatacatacccccctgcctaattgacatctccacttaaatgtatcagaggcaactcagactcaacaaggaccaaactgaatgttcgaccttgtccttcaaacccgatacacatccaggttcctccatcccagtgaatgacactatccagttaagcaagccaaaagtctggattttttttcctcactcttcctcactgtccgtcaactaccattattaaatctgtcacctggtcctactgatttaaccttctcaatatctctacagtttttctttatgcccattagtatcctagtgcaagctaccatcgtctctcattggaattaacacagtaacccccctacccaccagactgttctgcctacagatagtgtgatatttaataaatataaatctagccttggctagatttctccttcaaaaggttcacattaattttagccttaaaatggtgtgcaaagctttgcatagtctgtcctttgctatgttggcagtattttttactatccctctcatctgctcattctctgtactccaactacactaactttgtttttttttttttttagatttctctaactacagtgctgtaatctctttttcctttgcacgtactattccgtttgtcagggaatctgctcactgtctccacccactccacacactcacgttttcctgcccgtcttaccggtcttgatcggttgtcacttgctcaggaaggtttccctggtcaccccctccacaaattgaattaagtcctcttgctgcatgctgtcctagtgctctttattttcctctcctcatccttaattcagtttgtaattacatgttatttgtgtgaggatttgattattatctgtgtcacccactagatattgggcattctttacttactcaccactgaattcatagaaccacagtaattgtacacaacaaatattcaagagaaatttattgaattgatgaatgaaaagttgtaccttaacatgttcctgacatgtatccaaaaaagagctcccctttggggtctattaggactttggacctaggtaaacgtaaccctagtttcgctcaggtttaaacagtagaaagtaattgggtctcttttgcatgtggctttcctaagggctaaccctgtcttcggaatgagtcaatacagcagagctgttgaaagcagactctagcttcggacaacgttggtccgaatcatggttccgtcatttcttagctgtgtgatttagaataaattaatgttttaaagctttgatttcctcttccttaatctggagatgctaataaagccaacttcgtagaggtattgcgatgagtaaataagcataatttgctgtaaacaccttgcagattgcctgttgtatgctaactaatcaataaattgaagctcttaacatcattatattagatatttccagcattgagtatactatcaggcatgtggtagaagctcaatataaagttttgttaaattgaatagattccatatatggtatttctacagcattatgctccttatttaagtgtctctaagtattttttaagtatcacctcacaaaagacagatgtttaattcattacacatgtgaattgttttagatagaaaataaaataaaaaattcaaacattgaaatcaatagtgtaccttaccttaggattacaccataaaatttctaccaatcgagaataaagtgtacagtctatttcctttctaatacttttaacgcaacaaatgtttattgaacacttactacttctaatctatgacagacataaagatgaataaagcatgccacaatgtttaaaggagctcactatatcataagaaagcggattcacacagacaactctataagataaagtggtaaatttaggctggcctgtgaaacaaaggattataggtatagttaagaggtggaatttattttacttcgaggatttcagttacctttatattctttgtctaacctttcatgtttctctttcttcagaaacagagcacctttttcctgacacattcatttccccctatggagtagagcagttgttttcaaagtgtgggtcccagatcagcatcacggggatggttagaaatgcccattcttgagcctcacaacagacctactgaaacagaaattcttggagagtggagcccgcagatctgtgatcaagccctgtaggcaattctaacgcacactcaagttaaagaaccacgggaagaaaggtccatcctgtaacaagacagatttttttcattagcatcaattttgatcatttatatatatatatatatatatatatatatatatatatatatgcatgctcacaaaaccattcaccttactaggttttagtattccccttcctgtattcatgtggtatgtatgtatacaagatgaacacacatttacctgagacaaggtaagactacacatgtctcatttggggaccagaggctgtaatcttactcaaggtcaaagcgtcttcactgctttctttcactgcttttcaaaagtaaaatttccatgtaggtgtcatttgttttctttttgtgttttagaaaaccgattaaggggtgaagtctggctaaacttagtgtcaggacatttacttagataaaattattttaatttatcttgtaatgttcaatgtgagaagaaaagtccttatgagtagtgtattccttaaataacaacaatttaaaaactaccactgaagtctgtcagagtagttttgcctcatttgtctagataagagaaaaaaggttcacattagggattgcaatttgtctgccaaagtgcagtttatttattcagaaacatttagagaggaatgtgtcagttctgttgcaggcactgtgctgtgacggggagctcaagatgatctcaaaaaatttcacagatggggtgggcagggggcacagagagatgtatttagtggttcagatactatttagactgtggccagcatttctctaaatgcaatccagataacaccttacagaatcatctgggcagcttgataaaagctgtagactcctacccttcatcccaaacctattgaatcagtgtctgtgtgtgaagacctagattgtgactggtaattataccaaagtcttagaagcaactctaggccagtaatactcacatcagaatcagctggagggtttgctataccacagattgctaggttagccttcagagttgctggtccagtaactttggtgcaggtccagattttgcatttccagcaagttaccaggtgatactgatgctgctggccttgatcgtgctttgaaaaccactgctttagctacgctataggaaaaaccatataaggcttttatactggccaatgacttcacaggcctgaattttagaaagcccccttctgcagcttggcctatagattcgaaggaaacagaactaacacaagaaagctagttaggagctagttaaaaatcatcctgacttgccaaggaaaggtgctgaagacctgggtcacagagcaaatgcaaaacactaggactttgtccctagttcaccattaaatcaacttattttctcttaccccctcatattcacgtttactccttactttgtagtggttggacaaaaatcaaataaatctgagaattctaaaatgcacacccttgtttattttctaactcaaatatgccactgttgtctgtgctctgtcaagatttcaacacatctttttctcctgtttgcttttccttttggcatatagtgagtgtgtgtatacacacacacacacacacattttttttgactccttccaatgcccttctgctctccgcagatacacttctgcattctgaataaaaccgaatacatatatatatatatatatatatatatatatatatatatatatatgcacacatattttgaaaaccttatttgaaaagaaagctttcggaggaaacgttatttagccacttaatcgagtcttttactgagggactttttgtcgtcccctaacttcctgtcagcagtccacaggcagcaggaataatgtgggagaagatcaacaggcttatttcaggaggtcaggggccagtgccaccacctgcaggtggagacatcagaagcaggaagcagcccaccagctgcagggagaactccccacagagcctaaccaagatgaagggacttgtaaatttcaaccctcccttttggcttttgtgctaaaaatgtgaatattgaggtctgccctgattaagaactagatacattcctctttgtgactgccacacttccttagcgtattcattttttgtctttcgatctcaagttattattttcaaatgcattgcacgtatctaccatggataccattgcaattggaaggagcaaacgttttgtatgtttacttgacaaagagaagtgactgcccaagccacacagagttctgcacaaatcagtaacttctaacgaacgtttgcacttccgggcttgttctctacctatttcagtcgatgcatttgtattatttacttcaaactccaatactaataatgcctcaatcaggttgcaattgggatttgagcagccagaatttcagaaatttggtttggtccatatctgtgacaggtcagtaaatcagagaagcaagggtttggttgctattataatacattgcttacctatcaatttagttatcagccaaggtggttgttatcatccaaagtggctcattaaccaccttggagactcagtatacaattgcaagtaaccctggaagttgtaaataatcccaactgaatttgtatgagtttggtaaggttaagtggaaaccagctgcttagggccttgattataaatgaagttaggagtggaagaagtaacaaaaccccaggcaaattcattaaacattttttcccttcaactttatgctcacgaatgtgttgagactcttctgaatccataaaacacctttcagcatcatctgggcagcttgataaaggctgtagactgcctgcccttcatcccaaacctactgaatcagtgtctgtgtgtgaagacctagattctgactggtagttataccaaagtcttagaagcaactctaggccagtagtactcacgtcagaatcagctggagggtttgctataccacagattgctaggctagccttcaaagttgctggtccagtaactttggtgcaggtccagaatttgcatttctagcaagttaccaggtgatgctgatgctgctggccttgatcatgctgtgaaaaccactgctttagctaggctataagaaaccatataacatggacaaggcaaatgaaaaggttggaattcttctgaatcccaacacatttgtgagcataaagtcgaagggaaaatgattcttctgaatccagacacatttgtttaaggataaactgttttttccttctgaaaatttaatgtctgattctcgttcattcattcatcaaaagttatcaactatcaactataggtaggaactgtgcaatatgctggtgataaagagatgaaagacacagcccctcccttcaaccagctcctagttgaggtggcaagtcagctgtataatcaagtaattgcaagactgtgcactgaaaagggtgaccacagggtgtgatggccacccagggctgtggaatcagtcccaaaatgaagaatgaaagcagggaagggtaattcagaaagaagaaacagttcgcataaagacccatagataaacatcaatcagatgtggttaagacaaaagtaagtttctggaggctgaggaccttctcagctatatgtttgcagtgcttggtatagggctttatgcatctacatggaagacagaaagggccacatcacagtggacaaggcaaatgagaaggaggcagtatcagaagatgagggtacaccggagatcctagttatatatgggcattgtgttcatctcaggagttactgagtaatgggaccttgactcaaatgaatctcaagtctgtttttgcctaatcttggttttaggactaggattagcatacaaccgcactaggagcctagttatacgaaaggctgcattgcggacctgatacagttcaatatacatactgtcaccttgcaaatagggttacgttagttctcaagactgccaatcctctgtgctctaatccttttggcttttttttttttttttttaactgtctcactctgtcatccaggtgaagtgccctgggatgatctaagctcactgaaacctccgcgtcccaggttcaggtgattctcatgccacagcctcccaagtagctgggattacaggtgctctggcgccaccaggccctgctaagttttgcatttttagtagagacagggtttcaccatgttgcccagactgatctcaaacgcctgacctcaagtgatctgcccgctttcctttggcttttaacactatagagcaagggtccccagccctggggccacagaccagtacaggtcagtgacctgttaggaaccggggccccacatcaggaggtgagctgcagggccgccagcattaccacttgagctccaccttctatcagctcagcagcggtattagattctcataggatcacgaaccctattgtgaactgtccacacgagggatctaggttgtgtgctccttatgagaatctaatgcctgaagatctgaggtgcaacagttttatccccaaaccatcgcctcccacgcacctctccccacaaccccacccgcccctgatccatggaaaaattgtcttcctctaaaccagtctctggtgccgaaaaggttggggattgctgctatagggcgatggttttcacatttgatcctgcatcaaaatttccaggtgactcattaaaatactgattgctgtgccccactcgtaggagttctgataaggtagctgtggggtgagacctgagaatttacttttctaataagttcccaggtcatgctgatattgctttgataaccaaagcaatatcagctttggttatcaatatataaccaaagccacatagagggggagaagttccttgggtttagcccagtgtttactgcgaccaccaaaattgctggagcttaaccatggctcagagagttatgttctgttcactctgtaggctgctattccctgtcaccttttgaactatgatggaggggaagagctgccagctcaggagatttcacttttttctctgcataattgaaaatccagaaacacagggttttgggaaagctatagaacagatcatcagtgatcagtgtttaataaagtaaagcaataaactttactgtgtaaaataggatactttattatataaattttgtccccttcccccacctcacaggccaataaaataatatacttcttgtccctgggtgtaatgttattggaaacctttgaatgtaggagaggcatgggcttgtaagttgcagaaaactgctagcctaggattgagaatttcatggataatccaaaaatagatgattttacagttataagccttacgtgaacttgaggtaagaaaacacaatgcctttatagtcttctcagttgctccacatgccctctgagattctgttctgcccagcctctctggttgtcacatctctgggcattaacagaaagttcacatactctttgtctctgatgataatccttctaggtccatatagaagatccctatccaaaccatcccccaaacaaacctattggttaaatattttctccaccgaaggcactttcttagattctaagtgccctgtaggcaggcttcctctctgatttgggagagtacaaattgcgacaaggttaaatcatagcctgggaatttgacctaaaattcactcttctcccatatgcattcatgaaccttctgctggtttttaaaagaagctacttaatgtcagctcgaagaggttggaaggggttaaaaacatgagcatggcagtaagaagatttatgaaggatctgagaagattatgacttgatcagatggtattttgtcagctagccacatttgtgaagacttgaaaactagggaggcttgtccttctaagagggggcactgctgggacctggattctgtggaaccgtattagtagaataaacaataacctttgcttgtatcaaatgaacttctattctcatgtgtcttttgacatatttttattaatcatatcactgggacctccttgctgaaagatatctccgttccccattctgatgactcccaactaggagtgagatcaaatgaagatggcatggaccatttctccatgtgacagctctctgtggttgccttttaacacttctaatgccctttctcttaagaattcccatttgtcgtctggcactggtgctgtgatcaataaaaatgtaatggagtgaggcttagaaacatgaggaaatttactcaagctatccatttattgatgtgtccatttgtgttgtcagggaagaaaaactttttcactcccctcttaggttcattacttggggggctgcaaattaaactgacgacagatagattggcaatagaaaagacaaagtttattcagagaagtatgtgggagctcacagaaaacatagctcaatgaagttagaatttggggcttatgtactattttaacaagggttttgaaaagaagagtgttagaatttcaagccacaaagttggtgggaaatatgaaagaaactaatgaaaggtaatgtttgttttagtaaagtctgtttatgtaattttcttttcccagcgacaacttctcatctctggtgacaggagtcactctttacccctggtgcaagaaactttccttaaaggaggatttaaaacagttgaattatttcagaaatctttgcttttaggcagatagggggagtacagaaaaagccccttcccgtatctgttgatcctcaaatggctttagctcaaaacaatttttacatcacgatggcataatgtagatctcttcaatgtgttcatttattccacagatatttgtgaagtacatgatatatgccaggtacttgggatacaagaatacataagtatgtccctagtctcgtagaacttacactctagtagtgagctagagaataaatgatattatttattatatgcatacacatatgatttcagatagtgatccatattggaaataaagctggttaagggaatagaaaatgatattgaaggtggacttgtttagattgggtggattggcatggcttctctagggggcagtatttgagcagatatgagagcagatattctccaatttgggcaaaaacattccaggcagaggaaacaagggcaagggcactgagttcaaaagagacttgacctagccaacaaatagcaaggattccagtgtaagagaaggtggggaaggaaggaggtgcaagtataggcaagggcaagatcacacgggatcttgcaggccgtgataaaagaatttaactctttcataattttgacaggacatcattgaagaatttagaaaaatagagtggagatacctgatctgctttcttcaaagagttcattcatcattgctgagtagaggttagactgaaatggaagcaatagtgaatacagggagatagcacaggaagccacgttactagtccacatcagaggtggttcagactagggtggagtggtggggtcagttagagagctggtatttaggatacattttaaagacaaagctgacaggatttgctgtgatgaattagatgtaaagtatgagaataattgagaattatttctaagttctttgctggggaaaagtggaggaggaaaaagttagggtacaaggtgtgatgaaatcaagagtctctcttattatcagagtctcattagatatccaagtggaaatgctggaaagaaagttgggtagatcagtctgaagctgaagacagatactgtgactggaataataacgtaagagttggccggacacagtggctcactcctataatcccagcactttgggaggccaggataggagaattacttgagcccaggagtccaagaccagcctgggtaacacagcgagacctcgcctctacacacacacacgcgcgcaaaaattaatcgggtgtggtggcacatgcctgtagtcccagatactcaggaggccgaggctgaaggatcacttgagcctgggaagtcaaggctgcagtgagccgtgatcacaccgctgcactccagcctgggcaacagagtgagaccctgtctcaaaataaataaataaataatgtggcagtcataggcccttagatggtttttaaagacatgggactggatgaagtcttctaggaggagagtttgggaaaagagcccgagaattgactgcacctttcaaaacaggaggaagaaaaaaaatactcaaaggagacaaaagcaacttctgtgatttatagagaaaaccaggcaagtgggatgaagaaagtccttcatgatagaatcaaaaacagtgtcaaatgttgaaaatacaattagacaaacacaaaagaatagaccattgggttttgcaatatggagctcatacttgaccttgataaaagacattttcactggaagcatgcatcaaaaaactatttgtggtaggttaaaatgtagtaggaggtgaggatatacagacagtggctttcactgtgcagatactgctgctcatgcactaattaaaagacatttgttgagtatctactatgttgtatccattgctaaatagtaacagctgggtttagtcaggtagaacagcatcaaaatcattatagtatcccaagataggtacagtaaaatctgtgaaggaatcagagtagtctcttctccaacagagcgtaagacccagcttcacggagaaggtggtagattagctcatctgggaggctgagtagaagcttgtcattatagagggagaacatcagaagtgtggacaacagcttgaataaccttgaaaggacaaaagaggacggtctgccctggaaatattaagaagtctcacatgattagacacaagatattaggggaaaggcataaggtgaattgagtcaatgaggtcaaagagaagctagctggaggaacaggcgatcataaaatgagtaaaagtatatattcaaagattctttttagaagggctacacaggatggataaggggagagagagagttgaggcacagagacaaattggaaaggtgcaatcataaccagagacatgaaaaacccatagaaatctgatgtagattatgtggtccccaaggttgaacaattaagtacgctttcagttgttatgcccatgatattaacatattttataactgcaataagtgctgaagctaaagataaatacaaacaatgtaattcttattctgtgagaaaatgttgtagctggaagttaaacatgtttcttagctaaagaaaaatattgtgtgatctggattacttaatgttataatttagcaacaaaatgttgacattgagccttgcataatcaaaaaagtagtctattcaataaccacattctcagaaaaaaaacaagaaaatattagaaacaatgataaattatcgtagtaatttaattcagtattctattgttttatttggatttaggaaaggcagaaatgttgaaatattaatatatatccctgtaataatataatttgtgtctgagaggtaggaatgagggcatgaggtcaaagtttgataatgaacttcaaagctataactatgatcaggaaattaaaattggacaataaattcctagaatcgtcaggagttgcttgtgaaatcgagaaaggaaaggatatacacaaaaataaagaacagccaatgctctcaaaggagtctaacttttataatagtcttctgtgttagagctgaactcttctggtttagaaggacactctgttgcctggaaatagggcatggaaaaagtcatcagagtcatgtcatctttcattcttcccatgaacgaaatcgaggccctgaaaagtcacctgtgtttgctgtattttattgcaactaagatgtgcatttttaaattgatacataataattgtacatatttgtgggatacatgtgatattttgatgcatgcataccatgtgtaattatcaaataaggatatttctgtatccgtcacctcaaacatttaccattgctttgtgttgggaacatttcacgtattttattatagctattttgaaatacaaaatagattgtcattaactatagtcaccctactggatgcaccttgtttttaatatttctgaaaacagatacgtctcataggtgatggtgtcacagctgtgcattagttattattgcctgtgcaggtgcaaacgtaactattcatattgttgtcaattaattaaatagttacatttatttatatgcgtttattatactaataaacacaatattgagatagttgagctctagttttgactctgctgttaactagctgcgttactttaatttacttaactaatttggctttcaaattcctgataagtaaaattacaacatgagtttctcctgctataatagcctgagaaatcggtgaaacacatgaattcagatgttgatgctatttaatagcgggattccagatatctacttgccattatgggagggagagaggaggtggactggaggctgtgatttccctaggaggttgttaaaattggccaggtgaggaaagctgagacagaccataaatatgaagcatgatacctagccctcagtgttgaaagaaaatcaaatctcatctttgtggtctaaatatcagtatgatacaatcctctgtgtagacatatcctctgccctattgttttctttctaaaagctaaagcccaggtgtgatcacatccctccgttatttacaaatttctgatgatgatgattcttctaatatctacattccttaccattaccatgatgtccaaaacctattataatctattcgtctccaagtgccatgttgtggtcaccctatgcaccctctaaacccaccatatgaccttcccgctgctacttgaatacagttggccctctacctcgttgtgtctttgcattgcctatttaattgcctttccattctctaaatcactctttcgctggaccagcaacatcagcaccatctgggaattcattagaaatatagatcctcaggcctcatctcagacctgcttgatcagaaacattggagagtggagatgagcagcctgtatttttatcagccctctaggtaatttgatgcacactaaagtttgagaaccactggtctagagcattcttctttaactctcttctaaaaattattagaatgaattcgagggacgggatctccttgaaagccaagaacatttctttgtcatctttctgacttcagggcgtagtacactttttggcccataattaaagctcgataaatgcattctatgccaataaatcagctaatcaaatatattattcatgcccttgaggtatctgaaatttgtttgcagaatgtaatatataactatagagtaacaagagaataatttattgccatagataataaaacaatatcctctgtataataaatcctagcctctgctcaatgggcaaaaacgggactggggtttcagattttaaaaagattattggtaattaaatcacctggagaagcacttgctgcagagatgggacttgaagcatcataataaactgttgtttattatgattcggtcagagctgatggaatcacagggattgtgtgaggtatggaaagtggttgacattgaattccaggctgcacagttgggacttgatatgataaccaaaaagaaagaatgtctggggtggtagcaagctctaaatttagacaatctaggcttatcctaaggagaatatagatacagataactgaagtttgattaaagggaacctggtgtatcacaaatagtaaaaagctgtagttagtctatgcagctatcagctagccacataatacttttgggcaaatacattataaaccaaaagaatgacatggcttatctctgtaacaaagtggctcattgttctttattctactgttatccttaagaaaaaaattttagtaaatttgttatgctatactcaacttcaagaagggatagcgcttataaaaaaattgtttaaagaaacaggcctatttctctttgggagaagccacggagaaacgaaaagaatggaacgtgtgtttctgcccagatggcaataaaatgtagggtaaatttctgtcttttaaaactgtattttttccatccctctgtatatacacatatcctaggactgttataaaatgctgcatgcgtatgtgaaaatggaaccttattgggctgtttgatggacctttaaaatatatttgttggtttggggtacatactagctatgcaatataatccgcattatttcttatgtaaacaatggataaactgtttcacagtccagacatttatttggtcactgtttgtagaatgtctattttatttacttctgaatttgtattccagagatctgccttcaatgttggatacttccactgtaatattctaggagatgctcactttctttttcagcatctgacacagtaccatctgcctcctcttttcttgccacaagtaataacaattttataaaggaggatcacattacagaattataggtggtaaactttctaccaccagatttacccaagaacctgaaacacattttttcaaaaggaaatagaatgtccttcttgtgactacatcggaattttgcttgcagcattatgctttttttttccccctagtgtagctagccatgtggaactgaagccattagccagctcctcatcctataaatgctattacctgggaaaagaggcagaaaatatactctcttctccagttagagtctaaaggaagagaacaatatgggtagttgtgtttaccacaaattgatagaactcctttattttaaatgctaaaaccaaataacttgtttatatgacttcaacattgactatcacacactgttgcatgataacagagtgaaaactacctctattggatttaagtggggaatctatgtctcattctcattctttttttactgtggaaactagttgattccaggatcagccttagctccaacttgccacactttgagttttggtttttcacttgcattgtcacaggaaacttctataggataaatcgaggaagattttactctgcaacgtgttgcagaattaaacatttaaagtggcaaaaccttcgtgtgtaggttgtctccccagagaatgtaaaaatgaattgaaggcagcacctaataggtaaacgacagccaatcaaacaagaacaaatgaaatttgactggcaaaatcaaattgaaaatgtataacgctgaatctcagaatataggaggatgcatagaaactaagctgtactattataaaagtcatagccattgaaaaataatgactggttaatttggttttctttacctcatggatgtgaatggttagattttgatgttggtgttatttgacgtgtgtttgtcaagaagttgccttagtcggctcgcatttaggataaaaaaaatattttaagaaatgtttaagagattatgttggagacattagaaacaaaataattatgcagagggcaggactatcaaaatataatagaaaaattacaccgctcttttatgatttcctcctttttggcatttaacacaaaactttatgattacacacaccacgcactccagaaatgcttaaaggaagatgagaggaaaattcaatagaagtagcaggcatttctgtgaggacagcagaatgatcacttcatctctgtattttttttttttcaaatttctgtatctgtacaatgtcttttccagctctaatattctgtgatttggtaatttccgcactcagattttctttaatgaattttgtatgatattacctatttttataccagatattacctggctctaatttctttttcaccctaggaaataaaagtatcgggtgaatttcccattttcttatgttattgatacaggtctctgttggatatccccacgattaactttcctgcagcatgttcgatggtggcttaaagaagaaaccatgtatcagagccccttgtctatatagacttttagataaagagaaatacatatcacagaattattctgggcgcatagagtctctaaatgcaaaaaaaaaattgtattgtagctgttgattcttctcagatagattgagtgtagagagagagcattccaaaaactgagcagaagaaacacagtctgaatcaaataacatgaaattttagctaacaagtaaataacacttttttcagaatatgcaaataatattggtttattatgaaaaatgtataggctgatagatgagcatagagaaaaaattataaatatcttctttaatatcactttccccagcaaaccacttttaacattttgatacattttcatgttcaaacatttcctaatagtcttttttcctgttatataaatatgaattttaaacattcgtatgtttatgaaaaggcaataagatactgctcttttataacaggctttctgaacttcacaacatgcagtgtattctaacatgctccttgtgttcttaactaataaaaaacctcacgttatttaaaaaaccatcttaaacataattatccattaagagaagaggttggggtagagagtttcagactatcaatatcaaagttatattttctgtaagtattttaatttttaagtgtagctataggtatatgattataaaaccaatagcagagaaaagataccacctttgaatatagttttccttggttccatgaaaatggcctcctttctttttgccagtccctcagtatcattaactcatttttctgtaaatgccatcattgtatcacatgtcctcaggaaaaggcacttttctcttttaagctagtgtttgttcttgttctaattttatggcaatttaacgagtaacaatcctgtttctataaatactgtttcctaattaatctattgcattctatccatgagaatttagatgactttctttgtaagagaaatctctgtagcatgagattcttctttgctcttaaatttcattctttcacatttttaaatgacctgatagtattttgttgtatttgtgctgattttttttaaccaatcttaccttgttgaacatgtaagttgtttctaatatttgcaatgatcaaaatgtggatccaacttcactaaagcgttaagaatctaaaacaaaacaaagaacaaaaagttggctgtcatcttgcttggaccaccccgtgagttactattttcttgtttccggtcacagttcatcctaaatcatttcagtacacaaaatgttttttaaagtttgggacagggggtagagaatgtcaattattcctccaaggcagtcatatgagcattgagtatcatgtggaatagttgttacttgtaaagttatggggcatcaaacccagtcaatatgtttctggaattgaaaaagtccctggacattctaatgatactgttgttcactttgcacctactgttaccactactttgatctgtcaacactgcccgtaatggttaattttgtgcatcaacttgactgggctacaaggtgcccagatatttggtcaaacattattctgggtgattctgtgcaagtgttatcagatgagattaacatttaaattggtagactgagtaaagtagattgcccttcctaatgtgagcagacttcatgtaattaattaaaggcctgaatagaagaaaaacactgaccctcccctgagcaaaagggaatcgttctgcccgactgccttcaaactgggacatgggctttttcctgccttcagactttaaccacaatattagctgttcttgtatctcaagtctgctctacttcgattggaactacactatcagctctctcgggtctccagcttgcttgttcaccctgtataccttgggagttgtcagtctccatagttgcctccataattgcatgagccaatttcttaccacatacaaacacacacagagacacacacacacacacacacacacacacacacacatataattatatatgtgtgtgtatacatattctcttattccttttgtttctctaaggaaccctaatatactccttattactctttctactgccttagagatcttcaaggccaagagcgtaatcctccatcctggctctttttcctaatcattaatgatcaactcatagccatttagctcaactaaaaataatttgttcatgaagctttacactcccacatactgaggaacgtggtacctaagatcaaacagtcactgcctcatcaaatgcattcctcttcaaccccatacaaatgtccccagatggaactcacaccataaaaatattagatcccattgacttttctgctttctcaaggatcattgcagagcttgaaaaagatggctcctccctttgcctaagcaggttaacttggtgtaaaagtacatgtaagatttggcacaaaggaaaataaatcagttttgcctgggtcctaagaaacatttccctctgcctcatggtaattgtacctgccagttgattgcattactcaagtggagaccatgaagtgaagtggtagaacaagaagaaatccctataattttattaagtatggtgaaaaatacagatatgtagagaaatgactgggattagatggagcaaaacataattcgagatcctgatacaaattgtacttcctggctcaagggagggagcagaacattccctgctacatgggaataataataaatgcctgataaaaatgcagatatatcatagactacagaagctgaagtggattcttatggtcccctactcagacagcctctccttcagatgaagaaactgaagcacagaaagctcatcctagtgtttcatattgaaaaacccattcaagtctattttaataacctgttaccaaaaatgagggaaataatttaactttaatgtttcactttgcattacccttttcctgactagacttctatccttttcttgagttgagctcattaactactatgaaattatggttatgggtagaggttaattttatacctgtccatcttctggcatcttatttacactaaaaatcatttttaaatggcttcattttaaaaaatattatttcagttgacattttaaaagacacatcatttatgtactacagaatatgcattttatactctcctttattaattttattattttccaggtagaccaatcaaatgaatcagaaattcttggttagatctattagacagcataagtatgtttttcatcattaaattaagatgaaaacacaattttactttaaagtgtttgacgtttccagcctttataaagtcaacacttaatcacatctgaaatttgcaggaaaaaattttgaaagccttcaattattaacattatttcgggagaaaaagccactttgccgcagaactttcacttttctctcgtgaattaagtctgatacaaattattcattatggtgaagtttaaacataatagagtctagctacttccacaaaaatactattcaatgagtttctacattgacatctaactgaccttgtaattaatgttgtacacgatccttttattatatgctggattatcaaatatgacttattagcagtataaagacacaaagttctgaaatgtaatttatagccatgaaaaggaactgagctttgtgtgacagttaaatttgaagagatcaggtgattattatgaagcatgaataataatgcatattaaactcacgtttttgtttaaatcattaatatgattgttttagaagaaagtctacctctatcatatgggcaataaaatgtgtataagagcaaacatttgtgtatgtgaaataactcaaattaaaaccagttttccacattaattcttacagtttttaaaatttaaatcatttaatgtatcacacatagctttattcattttaagctataaatgttacaatttctgtttaagctgttaatataagctttgtaagagcaattctgtataaatatagaattgtcattattcactaatagctaccatttatttagtgcttgttgagtgcaaaagtactgcactgagatctttgcatatgttctcttaatgttacaattcttacctgaggcatttctgtttctgctggaatatggtctctctgaattgaacaagggaggcatttttggttgttatgatgaaaggtggacactgctggcactaacgtgtgttggtaagcgactagactcttcatgatgcgtaaacagtgtttcctcatacccctgcacattcaaatagaggaaaaccttgtttatagttaatttcccctagaatgtaaatccatttaacatataaacacaaagcgtgttttgtgtggatgttttttactggagcagggagacaggagaggaaatgcagttttgatagttgctgaatttttcaagaatgcagcaattatagaacaatttctagaagtttcctaggagctcttttccatagcagaaaactaggacttaatagccttgcgactcatggtacttgagtgttccatacaactcacctatattcaggggacatttgaaaaattctacattaaaggggattcttaacataggcgcaagtgtctggcatcttcaataggtcttctggtgtggccatgaaaacattcacacgtttcaaagtattttaaaataaaataaaacatatattgttgtgttatgaattattttctttcttttttatatgatggttagatcactgtgcagacaagtttatgagatctattcatttcatttcagggtggtaaatgagggtgttactaaatgttggttctaaaaagggagacattgggtattacagaattcagaacagctctaagccctgtgcacatttagcattagaggacacaggcaaatctggcctccagtcctggcagcttcttcactatgtatatgatgttgggtgggttgctttacctctctagtttttacttttatttctaagctagggctattcatagttctttatcatgtggttactgtgaagtagcaaagcacctgacataattagagcagataaaatgctcaacaaatattgcttatcagaaggattatgtattacctcccgaaatacatcaaaaatatattttccaattcaaagaatatgtagtacaaaaatcatgcctaaattaacagagttgcagtagcccaaggagagaagataatcattattgatttcttcttcctttttgctaagcagttctctgtctctgcctcctcagttgttgtccatcccactcccccactcccaagccctgaactctgaggggtttgctgccgtggccggttctgtagtcattgctgtccaatgatgaaaacacaaaatactgcaacagaacactatgcctgtcagcttagctcccttctttctgctaaatgacactcaatcctattcttttgttctaaaggatatcctaaatgaatagccactggggggaaaaaaggttatataagattgtgcactgtgtgaaactgatgcaaccagatcaatgatgtgaatttctcttaactatttactgggatctagaaacaggtctctcaacttagcagtgtttacgaatataataggccttccttatacatacatctgaagccaatctgagtcaggaagagtcgtggtctgataaatattttgaaaacttgcatttgttctattaaagcaaactgtttattaatagtgtgccttattttttaaagcaaaacatttataaacagtagtcattacaggcacttcagtgtacggagtgatcaattgttagacctttaggaatcgattgtttcgtggagcttcggcttataattgaaatgtcatcagaaggagtgtaagacatagcttcaggagaggccatttatgcgcttttgttttcagctaagttatagagtcatcatgtgaagaaagattcttctcttagtaaaaatcctttaatggttggaataacacttgatatttaatatttctttctactttatatccacatttattcaagtgctaacgcgtgtggggcagcaatgaagcactttattccaacattatagttctcatatctgcgtatgattatttttcatttatcgttagcatatatataatgatgacttttaaagtacactgtattatattcactggaataatgattagctattaataatttgaacactatccaggaaattactgaacatgtcctacaagataaacctcgtatgatattgtctccaaataacagtgctaaccaagaagagtgctaccaagttcaaaagtaatcacagggagtaacctaaatgcagctccgttgggttaaaaatagtttctctaaattatatgttccctaagtttgagatcgatttctacaaggggataaaatgtttttataaattctcagtgataagtcatgtgattaagaacccccaactttttttccaaagacatttgcatctctgatcaaaataacaagatccagtcttagttataaattggggaattttcatcaaaataaggagctactcgttgcataagaagactagtacaacttaaagccaatttaatttcaatgaatgcatgatcagctccattgccaattgagtgtttttcttattcatcagaagatgggttcatcatcgtgtttcatatcaactgttctcaaaccatattgcccatttaaataaatatagatttgtctcgaaattctaaattcatgtcatatttcataaatagcctatggtcctatttattactttaaaatattatagatataatatttttattctaaagtaactgtgttatacaaccaaattattcatttaaatatgtgactttttaaataagtaaatgacttatttaagtaaagtcattaaaattttccagtctgtccttcatccacctgatctttgaatgagttaggaacaatacaggaaactaatacaaacttaattttgattacaaaagatgaaatcattctgttatttattcaacacactatgtgtcaataaaatcttatactgtgaaagaattcgtctaagtccatttgctgttgcttgtaacagaatacctgaaaatgggtaatttacaaagaaaaggagtttacttcttacagttacggaggctgagaagtccaaggttgaggggccacatctggtcagagccttctcccatccaagtactaaccaggtcgaacctcacttagcttccaagatcagataagagtgggcgcgtttaggctggtgtggctgtagacttgttagagcctttttgctcatggggacacagcagagccctgaggcagtgcaggacattacatggcaagaaggctgagtattctaatgtgttcatgtctctcttcctgttcttataaaatcatgaatcctactcccatgataacccattaacctattaatttatgaatggatgaatccattcataagggcagagccctcatgatgcaatcacctcttaaaggcacaatctcccggtgctgccacgttggggattaagtttccaacacatgaaatttgggggacacatttaaactatagcaaaattgtaataaaatgttatatagaagcaatgttcttactgattataattgttatattggtaaagtgttaagtcctctaaccaagggatatatttcagcttattataatagttttaaatttacaattcaatatgaataacatctggtaaaagttcttttcaagaaatgggaaaattagaaatgtttagaagaaaataattcaataaatattaagttcaaactggattcatagtttatgtgaaattctgggaaccaattgcaaggggagaaaatagttacaatagcaatggtgaggatgagaataagagcaggtatcaacgttaattgagggtgtgttatagttctaatcgtgctatgcccactacatgacttttccctgtgtgaggtttccgagcttcttcgtagtaatcctaaattgagctggagagaggctagggtaacttactcacgctcatagagccatagagtagtaaaacctgtatttgaactctggcctgtctgacatcattctgtggtcttttaaaccaccactgcttctccatattaaaactccaaatctaggtgaaaagaagaaaactcagaacatgttctgcaacaaaatataacaaaatataatgtatataaacacttatacataatatcactaatatctttactatgaaaagactctgatacgaacattttacataattcatgcagaagtgttaatcacattgtctgtgatgagctgtgtatgtatctgataaaattctggcaaccagacatcaactcgtaggcatagatctgtaacactaaatatttgcctcgagaaacttaaagaaataaagacaaatgaatgaataggaacatggaactgagtacaagataaaatcctcctaaagcaatcgatgtacttgctgctgcgttattgttctaagcaaaagaagcatggcgaagggagatgtgaagctaaaaacagaatgcttagaaggagatgatagcaggagggaagcaaagatgggaccaagctcccaaaaggcgggctttgaacaaacaaaacagaaagctaagcctttgacggatgcacgggatgcaagaaactttagtcaggaaagaggaggcgaagaaaaaccctccaaagaaaaggtgaacaatattttaataggcaaattgacagatagcaagagatatataccatgctatgttttctcattgcagctgaagacaaactggggttatttatgctttgaaaaagcgtaaatctaaaaaacaattgtggaggaagaagcgatgaaaacacgtgttaatacagaaaacatggctccaaggctttaaacttccttgtgagataaatgcatttacattttccgtagtagctaatatatatatatatacatatatatatatatatctgggaaaataatacacagtgattttctttctttttttcatctacttatgtgagaaaaaagtaggctatctgaaagcttttcagttaaatgaggaagaaagttaggtgatcttgtaaataatatatatgttcaagataatgtaaggcccttgtgtagttttcaaaacttatctttaatagcagtttcttctggggatggggtagttcaaagttgaaatgttagaaagatgttaactttttttcctttttacttctccctttcaggatggaattaacaaatttgattacaaatagatctcagagagaggcaaatgcattgaatccagaagtaacataaaattagatcatgtttagttatgcccgaggtcacatggtgataaaaatgaggataaactgaaattgtctgtgagccagattagtttattttatgccagtcctaggaaaaagacacatcatggtaggatacatcctttttttttttaattatactttaagttttagggtacatgtgcacagtgtgcaagttagttacatatgtatacctgtgccatgttggagtgctgcacccattaactcttcatttaacattaggtatatctcctaatgctgtccctcccccctccccccaccccacaacagttcccagggtgtgatgttccccttcctgtgtccatgtgttctcattgttccattcccacctaagagtgagaacatgcgctgtttggttttttgtccttgcgatagtttactgagaatgatgtattccagtttcatccatgtccctacaaaggacatgaactcatcattttttctggctgcatagtattccatggtgtatatgtgccacattttcttaatccagtctatcattgttggacatttgggttggttccaagtctttgctattgtgaatagagccgcaataaacatatgtgtgcacgtgtctttatagcagcatgatttatagtcctttgggtatatacccagtaatgggatggctgggtcaaatggtatttctagttctaggcccctgaggaatcgccacactgccttccacaatgaacagacacttctcaaaagaagacatttatgcagccaaaaaacacatgaaaaaatgctcaccatcactggccatcagagacatgcaaatcaaaaccacaatgagataccatctcacaccagttagaatggcaatcattaaaaagtcaggaaacaacaggtgctggagaggatggggagaaataggaacacttttacactgttggtgggattgtaaactagtacattcttaacatcaatttattcctaaaagcaatgttcatagggcacactgtaggccatagatttgcctcacaaatttaaaggcctaagccctcaacatgcacagcagtatactcagagactatttgtaaagatgacgattctggaactttttaatgaccccaatcattagcaatgattaaaattaatattcaacattctatatttaccaaggcaataaagtagactaatctattttaaaagggttttaaaatgaagagatgaaacaaaccaaatgattttgatttaaacttcatgaaaacataagttgcattaatcaggtgattttgttttatgagcattctgattgaagtgatcatatttagccccgggagaataagagaaggtaaagtatgggtatggcactgaatttactgagatgattatattgtttgagttaaagaacttgtattaagaaacaagtatgtgccaaacattgtgctaggagcaagcaatgctaaaattacatgggtagaaagagagaatgaaatatctagaatgagttagaaacatcagtgttttccaatgtggagccctgacttcacatgaaaattctcattttcaaacaaggtagtttatgaaaactggactattagcaagacagggtgggcatgccatcagtatagtacctggtgtaaaactagaaattttaatcatttgtgctttcattttataatcagtaaaatccaaggtaggacaaacttttactttttctgtataatggactgatatttgaattatacccaactttaattttttgccagaaattatgctttattgtttctctaaaatggtactatagatctttatttatttctatatatttatatgatttttacatatatgtgcatttacatgtatatacatccataaactatatacatatatacacataaattacaaatatgtgtacctacgtacatatatatgcatatatcacgcaaatacaggcacattttcaatacccctttttgatttttttccttgaagagcatagcatctgaatttattatggatttatttttaatttatggtcatgttctttgagtgcttttggtgtttatctggttgccccaaactcgctagcattgtaaagaagatgtgcaaagcctgaatctagactgactttcatattgactttattagtcaaaaaaagtagatgaaaatgtaacagtccgtgttaaaaatgggaataagacagatgttcaagccctagcttcagcagtttttagctgagatttactggaagaaaacattttctgaactgtaaaacatgcaaaatgcctacgtgacagacttcattaacattattaaatgctatgatatagtaaaagaatttgtaaactgtcaagtgctttgtcaacattaggaatttagttattataggtatttccatatacatgttgtatttagaattccctttaattttatacttagggttgatttgtattttaactaagtcactttatatatctggtcccattatacaagtatacttttccttaggataagaaagtgatctttatatatgtttatcaacccaaatgcccatcagtgatggactggataaagaaaaggtggcacatacacaccatggaatactatgaatccataaaaaagaacgagttcatgtcctttgaagggacatggataaagctggaagccatcatcctcagcaaactaacacaggaatggaaaaacagacaccgcattttctcactcataattgggagttgagcaatgagaacacatggacaccgggaggggaacatcacacaccgaggcctgtcgcgaggtggggggcaaggggagggagagcattaggacaaatacctaatgcatgcggggcttaaaacctaaatgacgggttcataggtgcagcaaaccactatggcacatgtgtacctatgtaacaaatctgcacgttctgcacatgtttcccagaacttaaaatttaaaaaactttaaaaaaagaactgtagatactgatccaaaaaaaatgttcattaatgggggttaaatgattatttctaagtagactactcttgaacccttgaatctttaagaattttctttgctattgaagccattcaaactctattttattaaagctgtcgttattctagtagattttaaacagtaatacctgaatacattagaaatatgcaaatctgcattacatatggcatctgcagagcagaggagtttggtcatctggactcatgctaaagtctccgaaaaatccgcttgtcttaatgatggttgactcgctaatgctatgcgtatatagtcttattttaagtgattgaatgatgtggctaataacccctctgttagatgcactcagaacctcacctacctgggtcctcagctctccagtgaaatctctactttaagtttattttctaacatggtaagagccttcagtttatgttatgctcaggcccgtcactgtgaataaaatattagaaatggactttttttttttgtatttttttaatggatcccttggaactttaaaaaaattatttatttgagctttctactgttatcacagtgtctcctaagcatggcctcccgttttttgttggtaatataattcttacgttattcaaattagtaaccattatttttctcatggctagaattctggaaactattaggaaatcactgagcataattgaatggctgtttatttgaagagctatgtcaaggcagcatagagttgtattttcttgcaggggctctggagtcaaagagcctgggttcaaaccttggctccaccactttctatctgtggggcattgggcgtgttacatttgtgaaacttttgtttctccatttgtaaagtgaggtttgggggatgattaaaccagataactcatgtgaaatatttaatggaaatgtatttggtaggggatttattatttttaaatttggattgcacatgacacatgtcagggatcatgctatgcattttggatagaaagatggctaagatatcatgcctgactcttaaaaacttacctaatggtaaatgacgagttaatgggtgcagcacaccaacatggcacatgtatacgtgtgtaactaacctgcatgttgtgcacatgaaccctaaaacttaaagtataataaaaaaaaaaacttataatcaactgtagtagaaagagatctgaatggcttgccatttagctaggcacatggtatatgtgcttaattcatactagcagccactacagttgtcatgattaataatgagcttccaactgcacagaatgcttttaatccatagaaaatcaaatcagaaacaagtttttgtaaaattaatgtgaaaggagcaacaattaaaatgcaagattgacatttattttctaaattggttctattttctttcacatttacaaaatttataagaaaattctttatttctatgtgatataaagaactagaatgtactttgatgtgaattattgttgccagtgctgttcaacttttatccataatttactaagcacctacatttagacaaaggcattatccatccctttggggaggatttcagatgattcatacacagacctggtctcgaggaatttaagattttctttggggagggaaataaggactttaaccaactcaagagtacttagagaattttctgaaaataattttatcaatgaaaacttgttatattaaaagaaactgtcattctgacttccacaaatctaggcttgaaactatggataacgagatattttctattactctcactcacgtcattttcacaaagtgaaaaggtacattttaactagtgaaagaatagaggaaatggaagtagctcgaggcagtggacgatgattcaaaaagacagggccctattatttgatcaagttatgcaacgactctgggcctgtttcttcacctctggaaggaggaataatctccaagccctttcagactcttttggtaattcacctccagcacatcttctaaatgccagcattaactgtcctctgatttgtctcatgtttttctagccccatgctctcctgttcgccatttaccctcatgcaaggtacaaattacacccatcatcacaagacacttgctcaagtcccattgcccccttgaagacctgccacacctactctctcaaaaaccatcatttcctgaaagtcctatacagctcatttggtatttacagtgtactgccacaagccactaagcatcgttttgtgaatacatgacttacagacttagcttgagtaaagatacttgaaaatgaacaccatttcttggctatcttcctattttgatgtacccttcaggcctatgaattttagtataatagataaccaataattatttcttggttctttcctgcacatctgaataaccctatgcaaagtgatagaatgtttttctataaggaggtcctacactggagattgtgtatttcttaatgctgttgaaggaagagatgtgtatctaaaataaatagactctaacaaacattaatttatatttctattatctgttttgtgtattgagatatctcacaaaaataactaaacattttggcattattgatattacatatttgccatgaatatttgtaaatgaagaaaaatatatatacatcagtaattatcttggcaaactcttcaattatgcaatattgttacatagattacatatctaagtgaacactggagttttaacaatattgtgtgttcataaatgttttatttattattgccactaattcttattgccatttcaagaactatgtataagttgttctaaaaactattaaagtataggtgaccatggtcactactgcctactttggtaaaggccaaatatgtgaagactttttaatgtgttaacaaacgttgaaggttttttaacctgttaacaatcagtaggactcttgaaattatttcctaagagagtaaattttacaacttgcaaagcatgattaacctcttgtaattataaaccatctcttgtagttatgtagcattttgttaatgagcaaagaaccattgtggttcctttttacatttcttaaaataattctccgtaacctcattgatatctccagtaaatttagataagcttttttttttaaaggagggttaaaatgacattttaaactaatttttcttgttagttatacagagttgaactatctgagggttttattgacagtcataaaaaatttgttattttctgtgaaatatagagaatttaattcattatcatattattaattctgtgggccattgtcttaattctagaggcacaagctgttttcatcccactgaaatagaggaatcaaagtatgttccttgctcaaagcacaaaagtgacatactacatagtatgcttcttgagtagtcgtaaatctcatgtgttaaattacatcccaaagatttcagtatgttttatgactttaataatttatggtaatttctaatctggcctttgttgacctgtcttgctttttaaatttttagtttttcgacaaaataattaacatattttaataatcttccaaaggtgtttaaaatggcattgtatagagatagctgaaggcttttgagcttctgtgttgtaaacactttcttaataaaacatgaattgctaccagatgatccagcaatcccactactgggcatttatccaaagaaaaggaaatcagtatctttgaagagatagctttgttcccatgtttactgcagcacttttcatactagccatgatatggaatcaacctaaacgtccatcagtggatgaattgaaaagaaaatgtggtatgaaacagaaattgctgctttaatttatattaaacacactcatattcttctcagctgttaagtattgagttatagatttaaagaattctattgtgaagactaaagtgactattaaagtaagaaattattttttccattatatttaacttatttcatactttaatgttagcgccaatgagcaagactattgaatacaaaaactaattaagtagtggtgatagtacagtatataagggagaacattcttttagaaaggaacaataacagggagcaatagaaacaatgaatgagtgtaaggtcacttagtgttaaaacagctaaaatatagtacaaataagttgcgttttaatagtgattttatataattacaccttgatgttttatttgttacaagaattgtccaggaagatttctctaaagaccaaaggcactcttcccctaaataactccaaagccagtcctgtgtttctataaaaaaaaaaaaaaaaaaaaaaaaaaaaaaaaagtgaaaataacgtgatgaacatttttgaggaagtataaaaccaaaatactccactgcatagctgtttctgcaggtattgtattgatatattacattattcagctttggagtctccacatccaatgttacatcatcactctaaattaaacatgtatagataaatgaaataaatgagatagcatatgaaaatctcatagcccagcccctgcactatttaaaatagaaataccaaagaattgtattcctcatctgaaagctatttagtggtggtgtttcaaataaaaattccatctactgctgttgcttccattgtatctttttctctgcggtactgaaagagaaagagacccagaaggggccttgtctgaagtgtccctcttttaagctgttgctgctttaagcacagggtggacaaatgtaataggagtttcataaaggtggaataaaccagcggattacggtgtgggtgaatactttcagatgttaaccaggagctctgcttgcatgctgggagttgcccatgcctcttctagattgaggcacattatcatgcacaacctaactccaagaaatcttttaaaccactggaaattgaacccagaacatgtctctaagccagccttttcatcctgacaccgaatcatagcatgagccagtctgtcagggatgctgctgctctctaggcaaattttaaatgttgaaataatgaatcatgttttcttgaaaaccatgtacaccaaagaaaagttagtcattttatagatgatgaatattaacattttcttagacaatctgataaattatcagatctcacttttggctctttttaagacagttatgcctcagaaatattaataaacccccaagcccttatactgatcagtatgttcactactagctatgagaaattcttgaagttcttgtaattattgtattatttccttactttcattttattagtatgtgaataatatttttaaaaattctagtgtatgtcttgtatatattttaacaacatgacttttaattaatgtcttgataacatttcttctagtgtatgttttcagtaacatgattattaactgtaactttaaaaacctgtggattagatgggaccattttaaaatgttttaaacctggaaaatctgatggctttaggtttagttcaagctatagatcacctgtggagaatggaactgccaaaaaaaaaaatagctgtagcagccctttgagtattctaaaatagggatgttatccagagcattggtttctaaagcttccattatttattgatgttgagctttcaggatttagctacaatatttactcaacatctaagccatgcttttttatcagtcatgttttatatcttttataatcaaactgcttatcactgaaaaaaatatataagtttctatgtatctggaagaattctctggtgtttcttagatatggattttgatgtgtggaataagaattcaattcaaggataacagagatgttgtcctgaaaaaaatcgaagaaaatcagcttttctttaacattctgtcaaagctcctgactattagtttatcagcactgttttgccaaaggtgtcttctcttctcttctttgaaaaaaatcatctgctgctgctacgccgcaagtgtgttcccgctgtgcctgagaagatgtgtggcataaaaaaatgggcatggcctgagttaaaagtgctacatttaagccagagctggcttatttattagttgtctaatcataggaaaatgacagagcatgcttttctcttgcaatatccgttgctgaaaattaaacacatgagcagagctttcagagaggttgactggcctctcagacagcacctcataggatggcctgtgttgaagcatctcctttaaccagggtctgtccctcagcattgggttggctcacctagattggattgtcccagcagaaaaaaaaaacccaaaattcagaatcatatccaaaccggaatactctttcattcacattacttgtactaccttttcagaaactggatacctgagtgtgtgagggtaacttagaaacttatctcatggttagaagttttagaattagagagcgatgatcatgaaacggacttcatgatcagaagcaatggagcaaggaatgagatgtctttgaggagtatttccctgaggctgtggataacgctgacgaataatccccaccttaaaagtgggttgaccactctagtagctgtaaggtgggagggttctttcttcagagataaatctgtgctcttcacttgcccatttcccaggttttcatgtaggtagaagaaacacctgtaatctgaagacactcttccttcagctttgttagtgacagggatttaaatatgtctttcacacattttccttagatagttaaatttcacttttcctgtttgtttttctctgaaggtattctaactcccctcctaatggacttctagagctttctaattctatgcaatttctgttgatttgttctggtaaactttgaaggtaatctctgattcaacttcttggagattctatcatgtcatctctgtttattaactttatgttactcatggtttcttgatgaggactcattaaacataatgtaagtagaaaattattaactacataatatttactacgggttgttatttctgatagtagctagctgtaagattccaattgttcttcaaatctttgtctcagtgatctctgtgtagttcttgactacttcaaataacttcctagaaggatagggatttaataatctcttaataggaacacttaacacactgctggtgggaacgtaaattagttcggtcgttgaaagcagtgtggtgatttctcaaataacttacaaaagaattaccatttgacccagcaatcccattattgggcatatacccagaggaatagaaatcattctaccataaagacatatgcacgttgtgtatgttcattgcaacactactcacaatagcaaagacatggattcaacttaaatgcctatcaatgaacagactgaataaagaaaatgtggtacatatacaccatggaatactatgtggccatgaaaaagaatgagatcatgtcctttgcagcgacatggatggagccagtggccattatccttagcaaacttatatggaaacagaaaaccaaatactgcgtgttctcacttataaatggaagctaaatgatgagaacatatggacacaaagaggggaataacacacactggggcctactggagggtggaacacaagtggagggagaagatcaggaaaaataattattgggtactatgtttagtacctgcgtgagaaaataatctttacaccaaacccccgcaaaatgcagttcacctgtatagcaaacctgcacgtgtacccctgaacctaatttaaaagttataaaataaacgtatcttattttcagtacaatacaccacagagtagaagggttaaaagagattgcttctgaggaggtgagatgggggtaaggacagcacaagagcattttggggggtgatgaagctgttctgtgtcttgcctgcgatgatggctacacgactaagcccttgtcagaactcacagaactttacttcaaaaggagcggattttactacacatcaattccaataacaaatactttgtctttaagcaaagggatacctaaatatagcgtattgaatggatctccagaaaaacacatttttcagttcatgtttcagcctaggcctcatctcatccaggaaaccttgtcttgcttgcctttacatacatgtggcaatcagtagtttcttttagggctcggactgaacactcaatgaacttcaatcttagcgcttgtcgtagcagattgacatggtttatttatatgtgtcattctctgtagtaaaaggaaaggatcaaggccattcacttttgtagtgattgtgcatggcagtatttggcacatagtagattattaattatggaacttctgttttcacacacacacacacacacacacacacacacacttcagagctattttcatttaaatatttgctttagtctccaaagcccctctgcctcaacaccaacccttctatctcattattcatcagcttttctcctattacgaaactacttaggaaagcccacttatttagcttatgatggcaaaaataaatatttgtacttttttttttttttttagtcatcgcttcatagaacagcctctgtcctctgcttatgccatgtctgaatatatgctggaggtaaaaagagttcctggttgagagcttcaatttgagaaactatctgagattactttccaggttccaccgtggaacctgtctgaccttgaacaaatgacctcgaacaagtggctgaaatctcttctatttcgtcaactgtaaaatgggggaaaaccatgtctatctcatggggttcatgtgaaggttaagaaattgcttattcagtgtttagcacagtgcctgatatgcataaagctcctaggaatattagctgttattgtatttccttaaagaagcccatagctctatatgccctttcattatatgttttagtagcccaatttaacatatggataaaatatttttaagttaaatgatttgctaatggattgttgaacgagtggcagacacccatattatagacgaaggtcaagtccataacatacagtacatttccccactttcatttcccattaccaaaattcattattctcctgagaaactcattatagaattcatgtcagattcatctgtgtgttcccagcagtgccttatatccagaaataacactgagtcattgtctagatgtagcagaggtggaatcctccaaagagaagcctcagagtggccaggtttgccaagtatagggatgccttgattactggccttactctttatgctcgtgaattcctaagttttattcctcctgtagtcatagattggcttttaagctacaagctgaagagagagaaaacctcttccacctcgttggaatatgtctcttcaatccatttgagccaatttaggacatgagactgctcttagtctagaaccagtcatcaggagaattccaggtctgattgactcggactagcgggtcaatatcagggcaaaaattccaacgcacaacacgatgtatcagtaaggagaacctcaaaattatttcttaacgtccagatcatgttcctatttttatatatctattttctcacataagtcattaaaatgatgtacctgtgcgggtcctttaatgatactcaaagatcttgaattataggctaataactaacttaataagctgcagaaattaacatttctgctacgtttatgtagcattttcccacatgtacttcagaggcttgagaaaagaccctgaaataatgactgaataacagctttactcacttaatttcaaatttgttaattcttctgggaaataccgtcaacatccattttattatttttctcaattacatgtacgtttctacatcagtggataagttaaggagaagaattccctcatgataattttttcatgctcgaaaattttgaatcaattttttattttacattatactctttcctagtcattagaaagggagtggtggttaagataggcaagaatgctttataaggatactactctcgtttcaattcttaacatcaaaaaccttaacagtgtgtagactataaaataaaatatctagggatcagagcattgtgctgaactttgcaggttttttagtcaataatatatatgacgtgttcacagaattctttgtcaacaaagtacttttggagctccaggccatttaagttggtttttgtactttttctttttcttcggaagactttttttgttctatttacctggaagtgtttcttttttggtactgtgaattaaaatgagaccaatctactaggcaggaaaaaaccttaattagattgttgacacagacaaataagaatgtcaattagcatctactgtcacatgcctctccagactgcttctaggatgagtggcctcaagcagctacatcatctttatactcctaaagcatcaaggaaacttggagtgacaattcatatcatgaacacatccacagtgatgatgattgtgcttcttcccccccacccaacaacaaaggatgaatgccaattaatgtattcagttttttgcgtcaaaggctggatcacttgtgcaatgagggtaatcatcctgaccagacaggccatacaatccatattgtgtgaattaaagataatatgcgtgaaacaccttactctggatgtggttcatagcagtagcaaaaagatgaaaactatggtatgctaacattttagagatctgtactctattttaaataattttataaaagtgcatatacaataaaaagtgcacgtatcacaagtatatgcctcaaaatctaaagccagtcatgtaatcagcatccacttcaagaaagaaaacaaaacagtacccctggttcctctttgcaatcattagtctcccaagagtaatcaccgatctgatctgtgacagcatagattggttttgccctactatatttttgctgaattatacaatatatgctctttaatgtctggcttcttagtgcattgtatttgtgtatcagctattctcttgtgtgtagttattaaacaatcattttatgggctgcataatattccatagggtaaatataacagttttattgataacttagctattacaaatagtgctgttgcagacatatattctattacatgtcttttggtataagaatttacacatttcacatgggtgtatacccagaactgagattgctaaatattggggcacattgtatacattttgatttagtagataagatattgccagatatcgtaaatgcacagtttgataaatatagagatttatactttttctagagaaaagccatcaatatcagtgtatgtgtatatatatacgcgtgtgtatatatacgtatatatatacgcgtgtgtatatatacgtatatatacacacatatatatacgtatatatgtgtatatatatacgtatatatatacacatatatacatatatgtgtgtgtgtatatatatatatgaaacaactcagaagcagaaagataccccatgttctcacttataagtgaaagacaaataatgtataaacatgtacacatggacatagagtgtgtagtgataagcattggagactgaagtgtgggggtgtgcaagggaatcagtgataaattaatggctacaatgtacataatttgggtgatggatacactaaaaatccaaagttcaccactatccaacatactcacataataaaattgcacttgtaccccttacattcatacaaataaaaaattatttaaataaaaataaatatgtgtatatgtatgcatacatacatatgcatatacatatgtgtttgtgtgtgtgtatataacttacacttaaaataagcatggatgctgcaatgaatgctcaatttacaagggttgtccatccaaacttgtggcaagtatctcacctctcaagttgttttcttttttcttcatatatttcttgcttttgtctaggaaggaataatttggcttgcctttcaagagtgtacagtcagcatgataacccaaacacttaagacacgtgctaacccatgtggatcccttgagagaaggaaaacagtggtccttttactgggcagatagagcccggggccaggtttcgtggcttgaagatttcagcttctctgcgcctctcagctcagtgcctctggaagcaatttacaacttgtgaggccatactcaaaggccctgttattaattccccgccttccgagaccccatttcagaggatctcaattgctctcagagtgaatttactgtttcctgaattccgtaatcccaatagcaggtctgttgtcctcattagatagcttaagttagagtcggcagtgtaattggcaactgagctactaagtatccaatgcttatgtggaaaatatgttccctattgcaaacaactgatattcatattcaatttggcaccatcatctatctataaagcagatactacttgtgtttattaagttttatcccaaataattattttagtaataatgcttgaaaataggccttggtcatttgcatgtctgtatatggcatatcctgagtctttgtatgtattagaaagatcactcgttttgacttgatggtttaataaaagatgtccctcactttgggcagagacatttgaaaaaggcactccaaccagggacctaagaggtgaatgagatgcagctctgaatcaggtcacacggcctcaggaaggaaacatcttggttttcacatccctcacttctcgatgtcatgtgcaatacacaaatgacccctcaacacacacacaggcacatacacaaacacacactcactcactcactgtattgtctctttccttgactaagtccttcttactaactcaagctctaaagcttttttacttacctaaggtgagtgtgtgaggatttgaggtttcaatattaaaattcagaaacatttaaagttcattttaaatattagtaaaaaaaaatcttgacaaaatacaattatagacaaaaagaaaattcagaatatttggaatttaaggttgaggttacagccctatttatgaaatattagaagaaaaatgctggagagaataaagcaggtttatgagtctgatagaaagcataaccagatgattatgcatatatttgcatatgcaaagctttctaggcaatctgaacatttaaacctacaaatgtggctgcgatgaacagccacagaagagcaggctagaacagaagaggaggctagaacagaagagcaggcagaagttgtaaatgaaatgttaattttcaatggttgatctcccaagtactggaacagatttgtgctgttttcaaggttttggttcaaagaatccagtagtgtattgaattgttttgtggcacttccctgttattttgctttgtaagctacctcaatccatgaagtggctatgagccccttatacaacactgttgatttttttttccttatctacgcaaaagatttttgattcagggccaggcatggtggctcacgcctgtaatcccagcactttgggaggccgaggcaggcggatcatgaggtcaggagatagagaccatcctggctaacacggtgaaaacccacctctactacaaatacaaaaaatcagccgggcgtagtggcatgtgccggtagtcccagctactcgggaggctgaggcaggagaatcacttgaacccggtagccgagatcctgccactccactccagcctgggcgacagagccagactccatctcaaaaaaagaaaaaaaaaaaagattttttattcaggtggctatcagactcattaaatagaagccttaggttaagttcacgggttgctagttggaagcctccatggactatgttcataaaataatagaaaggagttatgcaggacttcttgaaatgttatttaaaaagtcagaataggctttctattacttgtctgaggtcaaatacatgtagtgctttctgaccatttcatccagggtgttagctaggacaataagaggtgcttaaaaattattagattgagtaaatgagaaagcccttagaaacataggaacagaatgacccttgctttggatctaatattgactcccacgcctaaatccctttggagaactcctttattttctcttccatcaagagcaggtataaattaaaaacaccattaaaggggccatctagctcagctgaagctttcatcacacatgtaggggaggtatggttgggagggatctttttatcctttaggtcttcaatttacataggacttttgaataatcaaatagccccaaagagctgatcttaggactagttgtaattgagactatttctccatggggtagaaaaatctagttgtaggaaaactgagaagtagatgtatgttaacctcaaaggctgttttttacaaaggatgttaaagcatcatctttgctcagaaagggagcaataaaacaaatgagtggaaataacaaaaggaaataatggccaggtgcagtgcctcacactagtaatcccaacactggggggctgtggtgtaaggatcgcttgaggctagcagttcaagaccagcctgagtaaaataggcctcatctctacaaaatagatagatagatagatagatagatagatagatagatagatagatagccgggcgaggtagtgtgcccctgtagccccagctactcaggaggctgagatgggagaatcgtttgagcccatgaggtcaagtctatggtgagctgtgctccctcctgccactgcactccagcctgggtgacagagtgagatcctgtctcgaaaacaaaaggcatactttttagatgtaatggaatagagtacttccaaacctggctgcctgctggagttgtattggaagaggttgcacgacttcagtggagatggcctagatgcctgctcagcagtcatctagttaaagcaactaagaacatgtaatatgaaactgcaaaaagagatcgtgtacgtaaaatcactctgggctcctcagatagagtaataaacacaactcctgacagccaaataaaaagagaaataatacagcccttgacttccttggttgctttgacatactaagtaggtgttacaggttgggttctctgggaaacagactctaaaacatttttatttttactttatttgttgttattattattattattattattttagacagaattttgctctcgttgtccatgttggagtgtaatggcacaatctcgtctcactgtaatttccgccttatgggttcaagtgattcttctgcctcaaactcccaagtatctgggattacaggcaagtactaccacgcctggctaattttgtatttttagtagagacggggtttcatcatgttggtcaggctggtctcaaacacccgacctcaggtgatccacccacttctgcctcccaaagtgctgggattacaggcgtgagccactacgcccggccagactctaaaataaagtttaatatgcagaatacttatcagggaatgcccactggaccaatacatattcaagagagggcttagaagcaggattggacagaaagagaagttgagctgtaatgcaggcccaataacagccttagtgttaagcaggctgagagattcagcagttaatgagacagtcaacccaaacagttttataggcatcaaaagtatgatcagcatggtgtcagtttcctgtgtcacttgtcccacagtatgataccaaaattaaagagaccagatgacatgcaacacaagcagtgtgcactctgttgttgagaagccaatttcgtcatgcaattaagcagttttatactctgcagctgtactttaaggggagctgagatggaacatcatatgtctcaccataaccagaaaggcagatgagaaatgttctatcgccacctcccacaaggtaagggacttccctaaagatacagaggtgggtggaatattgccttggtagacttcctctcaagactgcctatcttcccatgttggaaggatcacagagcatttgtcaagacgtgggtcaatctgcagttgaactttgtgtatgtggcctatgtggatacttataatatcattgggcacctccatagagctgtttcccaattgaccaaacatatgggaagcttcagagcttcgaatgacccttcagagtagtcctgagaacagtgagccttactactcctgcattaatcagtcattggatgatagccttctcagaaataagtcatgaccttgtgcaagggggctcttcatggctgggaccacccctaaaactgagagctgaaggctgtctgccaccagcccttccacctgctgggacaagttctttattgaagggaaatctgagtagttcatcagcgtccatcacagtagtcaagccgttcattcttccttcttatgacaacattgtgcttattgttatgtaatccctttccagaacattttaggttaagttttaaaaataatgcatataaatagacaattcaaatactggggaaaaaaagcttgcacttatattgttatagaaatgtgcacacttaaagagctgatttcttctgggtatttacataactttatttaaaaatccatccatttttaattagctgtttttaatatgcagttagctaagatattataagccatatattaggctaatggacatttaacagcttagttaagttcttttaatggaaatgctgacaaacctttgtctgtaattatagcaacactgtgattacagaaggaggtgcctctccttgttgtttgcagccctaaaattccatgtggctataagtaacaaagtccattattagataaacacaagtcatacttggcattacttgcattactcgtctccttgctttatttgaatcattttttaaagttgtaaaatgtttttcaaaactcagaatagtggccagttaataatatgattcctcttatattatgagattttaaaaaatagttcaccagtttctggtggcctctatacccattggcaagtcctagccattgtgaattaagtaaacaattctttatggaaattttttaatccttaaaccctataagtttttattcatcatgtcaggtcacttgtcaaagggtttaacattcagaattcaacaaaagtttatcaaacacctattacaggacgtgcaattttgggcgcactgggatttcagcaattaacaatcaagatatgatttgtatcgacatggatattacattctctcacaggagacagaaaacaaaataactagaaaatatacataaagagactttaaaatggggtaaaattacagattgtgacaggatgaccactttggttcagaatatctaggacatttttttctttttttttcccctccctccctctttcttttttttctttttctttttctttcttttctttctttttctttctgcctttcggagtcttgctctgttgcccaggctggagcgcagtggtgcaatctcagctcactgcaacctctgcctcccatgttcaagcttttcgtgtgcctccgcctcccaaataactgggactagaggcatgcaccaccaggcccagctgatttttgtatttttagtagagatggggtttgaccatgttgcccaggctggtctcaaacttctgacctcaagcgatccacccgcctcagcctcccaaagtgctgggatttacaggcgtgacccaccaggcccaagcaaggacatttttttctgagccatgttatttaaacagagatctgaatgacaagaaggggccagctctgtgatgtaggggaagaaaaatatgttccttctacccttctaggctgcccagctggagtcctacaaagttagagtgacaaaagacagattaacaagaggaaaagcctagaagtttattaaaatattcagtgcacatacacctggtagaaactcagtgatgagtaactcaaaggggtggttagaatgttgggtttatatagcatctgaacaaagaacagtaaacttgtagagaaatgacaaaacaaagaaaaaaggggtttaggtatttagggttgccaaactgtaggaaggtaaatatatgggagaaacatggagtatagtttgtttatgccaagtctatcttgagatcaacttttcgtattcttcatggccataacaatttcccaggagagagggcttatagcagttatcatttctcagaagtttctgcttttatttagacaagggaagcactgggaaggcttctttttgcttatattgattcttacttgcctctaactaaaagtaatctttatgtcaaagtgccatattttggagtggtatatattgatctcctataataacaatcaaaaggaacagtattctaggcaggagtaccactaatgcatagtgtttggtgtaaagacaagttaacatattcatggggcaacaacaacaataagccaatatggctaagacattgaggatgagtgagttggagaagtaggcaatggccagctcatataaagacttgttcgtttttataaattgtttagattttattgtaattatggtggcaagtgattggagagtattagcttcactttgactggcttatcgaaaacggaatgtagggggtgaaagtggaataaaaagaccagtcattaattgagtagtccgtgtgagagatgatagtggcttggacaaggacgattgtactggagagattgaagcgactgatttcagatttgtagtcaacaaggcttaattggtaggagaaaaaaataaatcagtgttaactctttaatgtttaacttgaataattatgatgagggtattaccatttattgagatgtagaatattataaagtaagagcagatttgttcaaaaagtatcaagaatctttatttggacatgctagtttggggatgcttattagagaccctaggaaactgaatataaatgtggattttagagaagagcttagggctggcagatgcacattaaggatctgtctagagccatggcgctagagacctccaggagaacataaatagtctcaagatcaagccctgagacactcagatgtttagaagtggaacagaagagggacatccaatatagaataccaagaattaggaggggaatcaagagagtgtggcaatatgaaagatacaaaaagagtgttgaagggagggagtaattaataaccagcatgttatgaggggctcagtataatgaaaagataagtgactattggatttggcaacatataattttttggtgatctggacaagagcaatttgaacagaatgatggatatggaaggtccagaggagtaggctgagtaaataatataaggtgggaaaatagatacaaagattatagacaactttttcaagaagttttactgtgaaggggcacagcaagctgagacagtgaggataaataatagactcaaggatggtaactttagaataagaaatttcaatctgatgggatttaagtgttagcaaggaagctttaagaagttattttccccattagaatgatctgaaaaatgttttagaacattcctcttatattctattttatcacatttatataactttcagagaattgaaagaggtattaagttattatgaaattttctgagattaataagataacaattataggatgttttcttttagttgaaatacacctactcagcctaatttttataacttcttactgaagtataatatacttcagtagaaaagcatgcctaatataaaggtgcagctagatgaatttgcacaaactgaacacatccctttaaccagcacttagattaaaaacagaaccttgatgatacctcagaggcccccttctgccccttttcagtctctccgtgctacccccatggataagcattatcgtgatttctaataccatagattaattttgccagtttttgaattttatgcaaatggatctatttcacctaattgtaaatatataacattgtcatagcaaggcactcattgccttacactgaaaattacattgactctttgccacaagcttagacttgctttctcattttattatcatcaagcctatagctttcacactataccttgttcctgctcttccctactctatttcttggtagatattctatatcagtcttagagtgcagtttgcagaacccctccatcagaatctcctagggagcttgttaataatgcagattcctaggcccctcccatggtttatgaatctgagagtgaggcagacaagactataccctctcatgcctctataatgtaataatgtcttcctagaatgttctttgctgcatctcttattaaagaaatcttatgggccgggcagggtggctcacgcctgtaatcccagcactttgggagcctgaggcgggcggatcacatggtcaagagatcgagaccatcctggctaacacggtgaaaccccatctctactaaaaatataaaaaattagccgggcgtgctggcaggcgcctgtagtcccagctactcgggaggctgaggcaggaaaatggtgtgaacccgggaggtggagcttgcagtgagctgagatcacgacactccactccagcctgggtgacagagcgagactctgtctcaaaaaaaaaaaaaagaaagaaagaaaaaaagaagtcttatgtttcctttatggccagagcacaacattgtcatgaagtcatctaaaatttcccactagaggtaacatctccttcccctgtctagctcttttaaagcattacctccatttgccttgtatcatagctgcttgtacacctgtctgtctttccgctgaggttataatcctctggagggtcatgactttgcattcctttgtgtctcccattagcagccagcacagtgccttgcatactgttagttctaaataacttctctctctctctctctctctttttttttttttttttttttttttttttttttttgagacagagtctcgttctgtcacccaggctggagtgcagtgcaatggcatggtcacagctcactgcaacctccccatcgtgggctcaaatgattctcctgcctctgtcttccagtagctgggattataagtgtctgccaccacgcctggctaatttttgtatctttagtggagacggggtttcaccatgttgcccaggctggtctcgaactcctggtctcaagcagtctgccctactcggcctcccaaagtgctgagattacaggcgtcagctgctgcgcgcatccctaaataaacttttttttttttggcatgaaatctgtaacactggaaagatgttattgccttagaataattaagagattaaatgtagaatctcaaaaacattcatttttttccatgaaaactttaccaggcctcaagggataggaaaattatgggtacagaattgagaatctgtaggaacttgcaagataaacaacggtttcacaagaaagaccttgttggagagttaaattttcagacagttgtaataacttcacattaaagttttgtcaaaaaataagtatctgcatgttttgtttgccttccaatgccctcattttatttgattttttcccataagtaactatagtgaaagcacgaaaatgtgtttctgtgtttgtgtgcctgtatgttaattgtgactgtttctattgcattgttattgcagaacctaggcacgcactctgtaggcttgggtgctttctccaactgaaaaaaatcctacatatggataaattatttttacagccagtgtttaattttacaagtggtccccctccttctgtttttaggatggcagagagaatacatatttacttaccattatcacttactcatgctttgagcttgaaggaaatgagacagaaaaatgaagtaacattaacttctctctggaactatgtttctcatattagagctttatctgaggagttcacttcctctctcttcaatgctttgttcctctccagtcgattcaaatgtcctcttaaagcagaagttccgaacctctttctgtgacttcaggagagcatgagaatgtaaatataagttttaggactaaattttcaaagactttttccactcagctctcttttcctcttcggtttgttgttgtcgttgttgttgttgtcgttgttgttgttgctgctgctgctgctgtttttccccttccacttccgtaactgagctcttagggtccatctggaatctgattgcaattaaaaaaaaaaaagtttatttttacctccttgtacgtgctttctcctaaagcaggagtcagaagccttttttctttgaagggctagttagtaaatattttaggcttgtcgtctttgtcgcaattactcaactacgctgttgtagtatgaaagcagacaatacatacctgaatgagcatggttttgttcctagcaaactttacgcacagagaaatttggatatcgtataatttttatgtgttgcaaagttgtattattcttttgatttctccccaaccatttaatatgtaaatcccattcttagcttgtgtgccatacgcacacaggcagcaaatgcgagttgtcacacaggctatagtttctgactttatgtcttaaagtaaacagtaataatcattctctttttccaaacagtccactaatctccctttgtattcagcccttgcatagtaaacgccgtttcttcatcatcctgatttttattctgagaaaatactgtatattgttcccatgcactagggttcggggaaatttaaaaggatgtaggatctccttttcattggtcctaaaattgcactggggaggcaggtcatgtttatgaacagataaatagtatcataatataatcatgcatttctatggctagcatttagaactatagcttttgatgtcatgtggtttttatatggttgattatttttttcttatttataaaatgaaaaagtttgagaatttttcatctccttaatgtattcccttatttgagggaaaagtatttacctactacataggaatttatcttaaaattttctttgtctatctatttttatggaatataatcgagcaactattttactaattaatactttaatatcattatgaaaatgttctcatatttttaaccttataagatcagataattgctatgccaatctatggttgaaatgggttcttatacttaacgctatgctctttcttctgagatgtaaaaatatgtttaaatcagaatttatataggtgtcaattcaaaatgacagtagttcattattttgattagtataaatgttcacaactaattctattctcttatctattaagtcaccaaataaagtatatttgttttaaatatttaacagtttaaattattctttgaaaacttatgagtctaaagtaagaacaattaacccattcattttgcaagtgggatagttgaattttacttgcaatccagggatttttgacagtttgaaatatacatacataccatgtatgtttaggaaaacatttaaaaagagggggttgtaaaataataatagttcttccatgattttttagccataatgtttataatataaaatatgtatactcttgttattgaatgtagtatgtttctaatttaccagaaggcaagagaataatcctggagaatttctcaaggcatcttcgaactctttgatttattgctcacatatagtaatttgccaaatgacgccctagtgaactgaaagaattaatgccccgtcctaagtcactttcaccgagggactgaaaacctgcagcattttgccaattagaggaggaaacaatctaccttgcagagtcaggagtactggataaaggagctaagagtgttgctttttttccccttcttactttaaaaatcccaattcatcccatgtctttcttaaaggctaagtgaagtagtaagtacgtttttgcaacatacgaatttagcagactggccttgtgtttatttttggccggaaccattacacttatttccaaccctctcctttatttgttggttgataatgggctaattttgaatctttactgtcaaaagaacattaagagaagcagccctgcctgcatcgcaggctatgtctgtcctttgccgagtattaaacactaaaaaaaaattaagaaaatactaacaaaatgacaaagcattaagaaaataaaactagatgttaaaggaaatgagaaaataggaaaggatgctgtacctggagtgattttttttccccaggctacctaagatgatcaaaaaagagctaatttctcttaggtttctattaaggaattactagaatatcgggcacaccaggaaactttatcagtggacctgtcctgaaccaaattttcttaatgtatatatgataatttgttaccacatcccagattattttacaggaattaaaatatatttgaaacactgacagggaaaattgggtaagacattgatagatactacaatctgtacttgaaactgcactcaaggaattcgttagtcaagaaagaacacaatgactgtgggcccctctgggttttggaacctcttttgtaaagcatttttttttttcccaaatagaagatattatttttgaaaaggttaaataaaaaatctttgttcactatatagtttcctcctaaggagtaaattaatttatataaaatattgcaatataaataacaattttaaaatctcaaaagagcagtgttttaaaaataatgtagaaacattaagaaatgacttcaaatgataagaatgtcattggagagcaaagggtttttaatattacatatcgtggcacgtatatcagcacccaaccgctcaagatacagagttctttacaaaaatcaaacagaaggaaatgtgccaccttgttcataaactatatttaataataagccaggcagataaagtcactttcacaaataatgagcaagcccatggtaatataattcatttacaataagatttatctcatggaattcttagactgtgctttgaaatttaaataattctgataaatgccaacagaatagagaaatcaattccagagcaattactaacacgttgcattacctttctaacattaatatttctcttcatacatatcattgaagagaaaatgaggatggaaaataaaaagatcaggtaatatatttgctttctcatctagggttgttatgatcttcaagatgaagttttattttttactcctagcaaatgatattcttttttattttagtttttattattttatttttctgtaaattattggggtacaggtggtatttggttacatgagtaagttcttttttttgatatttctgagattttttttttattctactttaagttttagggtacatgtgcacaacgtgcaggtttgttacgtatgtatacatgtgccatgttggtgtgctgcacccattaactcgtcatttagcattaggtatatctcctaatgctatccctcccccctccccccaccccacaacaggccccggtgtgtgatgttccccttcctgtgtccatgtgttctcattgttcaattcccacctatgagcgagaacatgcggtgtttggttttttgtccttgcgatagtttgctgagaaaaccacgaggtaccatctcacgccagttagaatggcgatcattaaaaatcaggaaacaacaggtgctggtgaggatgtggagaaacaggaacacttttacactgttggtgggactgtaaactagttcaaccattgtggaagtcagtgtggcgattcctcaggcatctagaactagaattaccatttgacccagccatcccattactgggtatatacccaaaggattataaatcatgctgctgtaaagacacatgcacatgtatgtttattgcggcactattcacaatagcaaagacttggaaccaacccaaatgtccgacaatgatagactggattaagaaaatgtggcacatatacaccatggaatactgtgcagccataaaaaaggatgagttcacgtcctttgtagggacatggatgaagctggaaaccatcattctcagcaaactattgcaatgagtaagttctttagtggtaatttgtgagatcctggtgcacccatcacacgagtagtatacactgcaccatatatgttatcttttgtccctcggcaccccttttctaccccccaagtctccaaagcccattgtatcattcttatgcctttgcatcctcatagcttagctcccacgtatcagtgagaacatatgctgtttggttttccattcctgagttacttcacttacaatgatagtctccaatcgcatccaggtcattgcaaatgctgttaattcattcctttttatggctgagtagtattcatatatatatatatagacacacgtacatacatatgtatatataccgcagtttctttatctacttgtcgattgatgggcatttgggttgatacttgcacacacatgtttatagcagcataattcacaattgcaagtgatattctcaggaagcatgatgtaagtgacagagacttactttgtagactgcactcattcacttgttctctgaatgtgctctaggcagcctgagtttctactatgtcagtgttacatagatgagaaaccccatgggtggtttccacagaggctgcaatactatttttgataccaaaaatctgtttggttttgtgagccccagatgcccatatggaaaactgaagtgttgatacctctttgtagccctctgatgaactgcatggttcaccttcctcagcagtttgagcggggtggggagagcgcctgcttcctagccatccgattggcctgaatcatcaaaaatgctatcatgaaacaggttctgtttatctgctccagattacacccatcatgttctagagtgctggtttcatgcttgaatctagatcaagcctgctttcctcccctgcctgtactccctgtggctacctacagtcctgctgctgacagataatctaaaccaatagcacctaattagcctatttgctcatgtgttttttccatcgtggtataatgtcctccttgtcaatttagggtgaaaatgtagcaacacgttgctgatggtttaatttctggaatgcaggtaatgaatgtgtttttgcttatccaagtcttcccatcagatgtcaaatatagaagaacagtgttcagaggtcctaaatttaaattggagtgagaaattcacagcgcccctgaactcaggcaaaatgcactctgacaagtcaaccagatattcacagatggtctggaggatttgaagcctaatttggtgaaataaaattaaatgagtgaaattgtatgcagtcattaatctatcaccatacttaaaatgcttcattgaaatttcttttactgcttcaaatgaaaaaagatcaaactatgttatagaaaagcattcaaaacccttacataacatagataaaacttggttggagacttacagaactttctctgctgcttcgagaaagttacagtgcccacaaatctattgctattagaatattttattgtattcaacactcaattctaccataattatgtatatgagaaaaatatttttacctataaaataattattattaccttttaaaaatctgacattcttccttttttctaaagaaacatatttagatttagcttttattttatttttgtgttgatacatagagattgtacatatttctaagattctagtgatattttgatacaagcgtataatgtgtaatgatcaaatcagggtaattgggatatccaccatctgaaacacttatcatttcttcttttcaatgccatcataccaaaaggaagtaaatagaatttcaaatataaggacagccatgattttacatacatgcctacgattccaccacaaaccataattacgtcccccaaacttttaacatttcagatactttgtcccaggtatttcatgataaggattgggctatgactctgttacagaagggccaaatgactaaaatgtctctgaacaatattgattgcaaatattctacccagttgtcaggtcaatatgttccaattcggaatttataacattgtatctctactcccaaaccatccaatctcacctacctcacttccatattatggtgggtgatctcagattatatttaagctcatggttacttgtcaagtagatatggagtttagcctaacttttgaaatttatgctgagattacccttctcattatagaattaagtaggcagtttccaagtttagatttagcaggcagtttttttcaaatcacttaaaagttatatttttttagggcattgaacaggtttgaaatcctaccaagatgtcatgtacacatagaccaatagaacagaatagagaacacataaataaaactgcacagctacagccaactgttcgtcgacaaagtcaacaaaaaaataagcattgggaaatggattaaagatttaaatgtaagacttcaagctataagaatcctagaataaaatctgggaaataccattctggacattggcttgggaaagaatttttgactaagtccttaaaagcaattgcaaaaaaaaaaaaaaaaaaaaaatgacaagcaaggacttactaaaataaagagcttctgcatggcaaaataaatgatcaacagagtaaacagacaaacaccaaatgggagaaaacttttgcaagttatgcatctgacggtggtgtaatatccagaatctatgaggaacctaaacaattgaacaaacaaaaatcataaaacatcatttaaaaaatgggcaaaagacatgaacagacatttctcaaaagaagatatacacgcagccaataaacatgaaaaatgcgtcacatcactcatcatcagagaaatgcaaatcaaaaccgcaaggagataccatctcacacccgtcagactggctttgttaaaaagtcaaaagacacccaatgctggcaaggccgcagagacaaggggatgcttatacactgttgttgggaatgttaattagttcagccactgtagaaagcagtttggacatttctcaaagaacttaaaatagaactatcatttgacccatcaatcccattactgagtagatatccaaaagaaaacaaatggttctaccaaaaagacacatgcactcacatgtttgtcacagcactatgcacaatagcaaagtaatgggatcaacataggtgtccgtcaacgttggattggataaagtaaatgttgtacacatacaccataaaatactatacagccacgaaaagaagaaaatcatatcctttgcagcaacatagatgcagctagaggccattatcctaagcaaattaacataagaacagaaaaccaaatactatatgtactcagttatgagttggagctaaatgttaggtacttatagaattgaagatggcaacagtagaaactagggactaatagaaggggaaaggaaagggggagacaagggttgaaaagctgcctattgtgtactatgcttactacctggttaatgggatcatttgtatcccaaacctcagcatcacgccatatatccaggtaacaaacctgaacatgtaccctctggatcttaaaagttgaaaaaaaaagatgtcatataaatattcgtggtcactaaaagtatctaatgtattatacataaaaataaaaattgggtgaattggaagtgtattctttgtatcaagtcatgtcggagatcctattctgctttgatcacagtgtgaattcttttgcatttttgttaccagtcacttctttatttattgaactaataattacatattctgataatctgtcagaaagataaaaacattctttgtccatgtgtctgaaaatttttaacctatttttctaatgttttaagtgagaagagcatgttaatactgaaattgtaagcagtagactgaaaaatcatcccaatccatgggttatatattgaattgcttttaactgtattactaaatattaagcttaatttattttatttctacatatccccatttccactataggtgatttgtatgaatttaggaacttccttctctcatccatttttatattaaaactcagactttctaaaacaatatttctatccatccatcgttggtaactatgtactgacatgttttgtgcatccgaaaaatgttagcattagtttgtgcgcacagaagtaattccagtcaccatatgatgagctgatttatttatttcgtaagtgtgttcattattattatctcttcagcacccaaatatataggggacttaatgatacctacaagtaaaaacggaagacaaaaacgccctgctctctacagaggttaaaatgtttttgcaacagggctctagatctcagctgtgaaagtagggacgagatgaggctaggcatgcagtgtcagtataatacaatataatcaacatgtcagcatctaatgcaggtgttgcaaaacaaaatgtacacatgggtagtcaggtaacagaaaagcatgaagtagtaagggctatctatgcaagaggttccaagctgactatatactgaaatatttaaacactatgtggggcaaataaaatggacattagaacagttcgatggtcagttggggacttctgctctttcttccagtctctgaacatatcttaaagccacaatcatctatttttatttattgttatacatttatttataagccagcacccctgtgatttaagttctgttgaaatgctgagttggaaaagatcgatggatgggggaaatttagtgcagaggttttgccccaggttcaaaatcctttataaaatattaatacatggaacaaatattgaacaattaaaccactgataagttaatcaatctgattcaaagtacacctgtgaagagggacatggcaagaaaaatattacagtaagaactagaaacattccttcatggctgcttgatatggatatgtcatgtttaagaaaattcttctttagactgttgagattttttttcctgacaaagaagattcactgtcgaggaaagaaagaggtactgtgaaatttgttattgaaaacatgcacatacttttgtcagaatgagttaaagagtgaacaaaatgtgcctattacttacgtgttgtgctgttttaattcaagattaaaatatttaacgtccacagacaagaccacttttatatgaatattatttttctgctttattgctcaattttattaccatttcaaaacacccgtgttgctttctatggccaaagatgtttagcacttttcatggttatacttctgtacagtccaaaatacaacacttactttacacatacacaaacatccaatgtattttgttttctgtcaagtaaagacaatgtctgtgttattaagttaaatgtcactttcaaatacaggatatgttgatattagaatgttcaactttatttcctcatttaagcaaattacagtgtgaagaatgtaactgcagcaatttataaaaatcatatcacattcaattatgagagcaaacttgttttgtagacttgaactagtttcaattaatcttggagttatcatttcaaaaattctaaacagagagaaatacggagtgtaataatggtaggtctttgggtaagctgcttccaggaaaagaaagcaattatatatgttcacatagcactgacaaggagaaacaaaactttggacggcaaagaacttgcattagtctttttgacatgttcctgtggtgtgatttattacgtagacaatcagctcaacttctcaagtttgatatccttggaatcatttgaaatttaaattttaatgaaaattcattaattccaaggccaaaagaagtgattctaattgcttttgagaatcagactatgaaagaattctttggcaaacttgcactgtcttttctcttttatcattggttgcttcgtaggtacttaattgaaggtcctctgattatcagcacgggctgacatcagttcactccatgcattttaaacagtaggccagatgtttaaaggatcagctgaagcatcgatagcatgctagggtgaataataaaattttcattatctacaagaagcaaataaaaagcataagcattttcccccattatcctgaaggagaagatgaatgcctaagcaacattttaagaatgggttgagtgtggcctgtgggaaaatttgggtagaaaacttgtagttagctaatgtatatactgtttgcctctttagctcaccatatacccacacacatgggcatgcatgcatacagacagacacatacaatacacacaacaaacaggaaattcagatatactgaagaaatgtatttaagggattactaagtttttgtaaataaaatcctttaagatgctgagaaacaatggaagagaagtaggacatgatggctcatactttcgtaatttacttgtttaacgtttgccaaggtttaaattaatgtagatgtttttgtggctaggattaatgatctaacagtttggaataattaggcacttttatcacctagaaagcccagaaacccagcatgcaaaaattctggtatgtctgcattttacacttagatataacagagaaatgacaagtagtcaagtggatagagaaacgaatgattcttcacacatgcacacacacatagaaattgtctttttaatagtattttaatgtaacacatttatgcataatttctccatagtgtttatcttatagtgaatatgtgatgaatagtctctaacattagtggttttatagattaaacataattaaggctttatatattaaagagtcaattggtgacattctaatataaacatgtttatctcatatacattgaaatattagataattcattcgttgagaataaatcgaatgagtcaaaacttttaacctccactttgagctttgtaatagtatccactgaaaatattcatgaaaatttttaagtcatttctatttatatattcagtccaaacatctcacaagtttaaaatgtaaactcaagaatataatttctgtattctacaattggaagcatccatcatatcagatgaacttatatagtttgtgaaattttgcaaactttctgtttagtaaatcttaatgtcaaacattttaacttccaggttgtctttcttttcagttttaatatccgcgatctttgtatactcgttgaatggattctcaataagtaacccacaaatatatatacatactatgtacctacaaaaaataataaaaagtaaagaaatcgacacttatccatacctgtcccatagtaataaactattcataagtatatttgaaagatatgagaatcataaaagttcgtgtttgcacccttttgtgcgtggaatcctaggtttgcattttgtggatctagactttttggagtgtggaaataaatgaaacaaataatcgagacccagtcttatattcaggttatcattttactacataaagcataaataacatttgcagtttgtttctatggctagctctaaagtcttagcaacgagaacattatagaaagacttcaactgtagcttccagcagaacttctgaggttccgtttatggactaagcagcagttgagggggacaaaactcataggcaattgatcactccaaaggatagattgtcttttctaacctaatcaaaagatttatagtgaaggcatattcagattttgttgaaggatatggatatataatcatgtgtgtgtgtgtgtgtgtgtgtgtgttagacatacttaaaacattatttgagtagaaaattctgcacaaatggaaaagtataacatgtgttatatccacacatgttgagcatttacctggctgaaacatcaaaagctgaattgacttaattgaatgttgaatacttaatagttactttgtagtgactcactattaaaacattatctcaagctttgtcagaattaatttttttaaaaaactcagattagtgtcaggtttactgaaacagcagatctgaaattactgtgtttttttttcctttcaataatcagtttctaatccaaaattgaatatcagttccaactctacattcagtttctgttttacttgtttggactggcttttggttctgttttccacatagatcctctctgtgtaagacaaagccatttgtgcagattaaattttactgagcgtgttaacctatttaaaacattcatccaaaaagactagtatgaattcttcatatggcaagctgcttgttttaaaacttccatttattctaaaatcctttttacttatactttttaagaaacgtattcccgatatacaaaagtaacacatgctcattaaaacaaattaaaaatagtattgtataaagagctgatacatttctgccttgccccatttaactttcttaagtgttcatgtgaatcatccattcacatcaagacatttatctgtattcatatgaacgtgttttaatatatataacatatatagaattttatataaactttccttttaaaatagaaatgaaattatatgatatatttattctgtgtctagctcttgtcacgtaattattcaagaacatatttctaggttaatatctgtattcttaggtagcattcactaactcctcatctacttgttttcttccattctaattgtgtttaacatttcttcatacaattggttgtcatttggtcttctttcatggagggtgcataatgttcattctcaccaattctttacactttacataactgcttgatacgaagccagaccttataaatatcaacaaagcaggaacactgtaatcagctatcagtttcagttgagctgaatgaccctgaatatgtgtacacatattttccaggagattttaaaactgacacctcagatttctaagacctggagaaatcagcatgagaaacattgatctatattattccgtgaaatgatttcactaaatagtgaagcatctcccacatgtggactctgtaatttattagaataaagagttcatgtgcttctgaagaacttgaactactcttctggcctccgtacattggtttcttagctataggaaggctgagcatgtttttcctatgcgtttcctttctagctcatcattttagtgacaaaacaatctttcgtggtgttgctctagctatagaattgtttcagattcatttgaccaaaggtggcaaatacaacagtcccaacaaaaacaaaagacctattacagaatgatggaaatgaccccagggaacaatggcacctccacatttcttaattccaaggttataagcagtggtgtggacaattctcaattccaatgctgaatcgccttctaatttcaaatacctgtgctaaaaattatttacgtctactgaaataatgaactggaccccaccaggaatggccgatatgcttgtagtcagagcacaactgtagaaagaaaataacattttaatttatagaggtatgatgatagctgtttcatactgttttcagaacgatgaatggcctgctcagtagtttcttgtcatcgtactgagacactttaatttcttaccagctgagatgaggaatacgagcccagtgtgcaggtgaaattggttaacaggagccattaaaatttggaagagtcagaatagcatcaatcaaaatgctttcagtgtaggaagtaaacatgtactagcctgacccacctgtcttttcttttaggtatgttggtaatattacaatcattttgaggtatccataaacaactgcttagatctgaagaattgtatatctttctttactctgccctggcctggggttatggttctcattgagctctaacctttcagaaaaaaaatgtagagaagtggttcaagaagaatgctttatcttgcttcataaaaatgatagtgatagttttattgaaggcttactatgtgccaggccaaagtgcgttttattatcgttcccattttccaggcaaagaagctggagcacagagaggctaagtgagttgtccaggatggctcagctaacatgctgcagttgggatttgcacccagaccaacttcttttcaaccactgtcccatcctgtgtcttctctactcaaaaagtgtttcagctccaaacctgaaactttaaagaaaaggaaatccttagtggaaagactaggttttagtcacaaattatctccttccttacattatttgtctctttttcaaatactccaagctttgattaaaactgtctatcactaggaacattgtagaattgctaaggtggaattgttaaaagaactcaattccaattaactttgccattgattactgtgtgttctggaggggtgttctttctttcaggttaatgatgctttattgtatatctcaaagattaaaaataacaatgaaggaagtagcaaaccggaacttctctcacaatgcatctttcaatctcgtgctttaaatgaagataaaatcatggctgtggtaaggttgcaggaaggatgatatagattaagtttcttgcaaactgccctctgaattttcaatagctgtagaaggtattggttttccaaaaaattgacaaattgaggattcattcagcagtttttttctaggtctcttaccagaaagtgatcactaaaaagtgtagggaaaccactcaaagttggatagatcattattttcacttaagcattttaatttcttgaaggagctttataatgcaacaaagaatttacagtcctgtgtcaccgcttaaattttctagggtcatcagtaaactcagtggaaataaattagttcatgaatataattgacccttaaattctgtcactgtgcaagtaatcggtgggtctgctggatatggctttcgagcagacaggtcaacttcttcaaacagagaagaagcatagcataaattgaagacaaataacaaactacttgtttcctccttctttggcatcaccctatggatggagtatgcatttataatttaacacaatcaagagatctttattatcctacttttgggtacaactgcttcgtttctcttttgaatctctacagctatttaaaaatctgttttgtaaaattctttaaaaaactaaaacatcagattcatatttcaggtatcttactatcttataccaacttaagcatccagtattatcacccacccttcccctgagtgaatccttagcactgggctcttcctgttttatccctgtgcatgctgagctctttctggccttcaagtctacttccgttgcaactgttgtctgaatggtctctctatgtccttcttactctctaaatatttcggaatttaaagcctggaataatctaccttagtccaaaagatatgctacactattctagttcacaatgatctcacactgccgttgatacacaacatttaatatcaacttaatatctatttcagttcattacgaggtcacttatgctacatcttatattgttgccttggacttttattatctcttcatatatgtgtttatggtgctcccaccctcacgagaagttgcaaataccatgttagctgtctgatggctttctatgttgtcaggtataccatttcccaaccagttggcattcaatgattaagttcattaacaaagaattgtatgtgttgaaaaagatgtttttttcttaatgaagcacttgtttttatttttttaatgaaatccaccctcttaataaattttaagtgcacaatacagtattgttaaatataagcaaaatgttgcatagcagatctttataatttttttaaccctacatgcctgatagtctatacccattgcacagcatctcaccatttcttccctcctccagcccttagcaaccaccattgtactttctgtttctataattttgactactttagatacctcatgtaagtggatgcgtgcagtatttgtccttttacgacttgcttattttatttagcaaaatggctacaagattcatccacattgtagcatatggtaagatttcctttttgtggcagaatgatattccattgtatgtatataacatagctttatacattcccctgtcaatagacatttagtttgttcacacctcttggctactgtaaaaatgctacaataaacatgggaatgcagatatctcttcaagatcctaaattgaattcgtttagataaatatccagatgcgggattgctagatcttatggtagttatattttttatttttttgaggaaactccatattgttttccacaaaagctgcacaattttatatttccaccagcagtctacatctccaattttcctacaccttcaccaacacatgtaatgatcttgggctttttttttttttttttttaataatggttatcctaatccgtgaggtagtatatcattgtggatttgatttgcatttccctggtagttagtgatgttgaacatcttttcatataactgttggtcattttaatgtcttctttggagaaatatctattcaattcctttgttcactttaaaaattgggttgttcgaatttttgttgttgttgttattacgttcctcatgtattttagatattgacaccttatcagatatatggtttgcaaaccttttctctcattctataggttgcttttaattctgttgattgtttcccttgctttgtagaagctttttagtttgatatatttctgcttatctagttttgtttttgttggctgtccttttagcgtcatatccaaaaaaaattattgtgaagaccaatgtcaggaaatttttcccttatgttttcttctatgagtttcatagtttcagatcttatttttaagtctttactccatttcattttgagttgatttttatgtatagtttaagttaaaggtccaattccattctttgcaatgtgtatatccagttttcccagcaccattggttgaagaggatatcctttcccagttgtgtattcttggcacccctattgaaggtgatgctaggtttatttctgggatctctattctgttccattggtctatatgtctgcctttatgacactatcgtgcgctcttgactgaggtagctttggtaattcattttgaaactagcaagtgtgatgcctccagtttattcttcttcctcaagactgttttggctatttggagtcgtttgtggtttcatatgaattttaggaaatttaccttatttctgtaaaaaatgcgattgggattatgataggaattacactgtatctgtagatggtttggatatatagacttttaaatgacacatcagatgtatttccatttatttttgtcatcttcaatttctttcaacaatatttcatagctttcagcacacacatcttttaccttcttggttgggtatttactaagttatttattctttttattgctattgtaaatgagattgttttctaaatttcctgtttttatgttgctagcgtatagaaacgcaactgttgaatgatgactttgtatcctgcaactttgctgaatttgtttattggttctaaccatgtctctgtgtggcgtcactcttaagattttctacgtatcagatcatctaatttgcaaacagatataattttacatcttcctttccaaatttgatgtattttatttctctttcttatctaattgttctggctagtacttctggtacgattttgaaaagaagtggcaaaagtgtgcattcttgtcttgtttctgatcttaagggaaaagattttcagtcttttgccattaaatgtgatattcactgtgggtttttcatatacggtttttattatgttgcggtaatttcgttctattcctagtttgttgtgtgtttttatcatgaaagtgttgaaacttgttaagcgctttttctgcagctattgagatgaccatagatttttagcctttgttctgttaatgttgtgtatcacactgattagttttcataaattgaaccatttttgcattccaagaataaatcctatatggctctcgtgtataatcctttcaatatactgttgagttcagtttgctagtattttaatgagttattttgcttctatatttatcagcggtattgttctgtacttttctcctagtgtcttttattgactttgatatcaggatactgatgccccttgtagaatgagcttggaagtgttctcttctctttaatttttctgaagaatttgagaaggattggtgttaattcttctttaactgttcattagatttcaccagtgatgacatttggtcctgggcttttctttgttggaaggttttggactactgattcaatctccttactagtttcggcctactcagattttctatttcttcaagattcaatattggtagattgcatgtttcaaggaatttgttcatttttttctaggttaacatacagttgtttacagcagtgtcttataatcatttgcattctttttggataccagttgtaatgtctcctctttcatttctgattttacttatttgaattttcctttttttttttttttttttacttaatctacctaaagatttgtcaattttattgatttgtttttaaaaaaactcttagctttgttgatttttctattgttttctatttcaattttggcttttttctgatctaatcttaatatttccttccctctgctaactttgggcttagtttgtccttctttttctaagtctttgaggaagaaaatggcaaggacatgactttctttagcagttggaaggacaatgctgtaaatactcaaaaattaattatttttatagtgacaaaaacaaaataaaaaacacttcaaagcaaatgaaagtttatcatttaatttatcaaatcactaagcagactgcttgatcagagagaagatactcatatgatcacataaaactgaaagattaagaggtaaggacattcatgttatcattacatctaactttcttatttccaagatggagaaactgagggttggagaaaaagaaagatttctttgttagatacaaacagacaggactaaactcagtatagcagcctcctaaattccaaagtatcatgatactgtgattttatgcattcttcagaaaaatagtagagccactggattctggcaaagaagttatataaaatgtcaagttcttcctttgcctcagaaatgaagttttatgttccaaaattgattgggaagttctccttatacctcacatcacgtctactattttacattgtttacttttgaagaatttttttaattgacaaataataattgtacatattcatggagaacctagtgatgtttttatatatgtaatgtatagtgatcagatcagggtaattagcatatccattatctcaaacattggtcatttatttgtgttgggaacattcaacgttctccttctagccatttgaaacttctatattattgctaactatagtcaccattcagtcgtatagagcactagaacttatttctcctatctagctataatttatttttaaatatgctttttgaatctgttactataaattgaatgtcacatcgttttgaaaatattcttaatttatgctcaacaggcaagattacacacctgtgataatatctttaatttaaaacattactctgtttaatttaccagaatatggaaccctagtcattttagaggtggagcaaatttcagtgataatctagtgcaaatttctcatcttatgaatgaggagattgagtctgatataagggacgagattttcgtcaatgagcagcttgttaacattagctctgtgatagaacacaggcacttgtcctcccaggccggtgtttcttctactctatgatgggctgttttgttgtagtttttaaacagcagcattttcaccatgcatagttttcttccaaagttcgttcttaacgtttttgcacagaataactagattttggaagtagaaaaaggaaattctctttgcatccttgtatctctggttattttctttgtcctttgatctctctctcctcccctcccctcccctcccctccccttcccttccctcccctctccttcccttcccttcccttccctcccctctctcacacattagagaaagagttaaggtattaaagaatacataatactattaaatttccttcacatagagaaaggaatgaaaaaaagtgaaaaatggtcctcaccaaatgtccaaacttctgtaggtcatttccatagtatcagcaatgtcctgtatggtgcctcggggatatgtaagcaaatgagcaagtggttagctaattctagctttggcaaacacttgttatggcttacttgaggagaagtcacttctccaaagtgaaaataatgtgcacaggtcaattagaatttttttgtagaaaaggaaaatactttgtagggacatggatgaatctggaaaccatcgttctcagcaaactattgcaaggacaaaaaaccaaacaccgcatgttctcactcataggtgggaattgaacaatgagaacacatggacacaggaaggggaacatcacacaccggggcctgttgtggggtggggggagggtggagggatagcattaggagatatacttaatgctaaatgaccagttaatgggtgcaggacaccaacatggcacatgtatacatatgtaacaaacctgcacgttgtgcacatgtaccctaaaacttaaagtataataaaaaaaaaaaagaagaaaatacctccttatgctcctgacttattttctttttggttcctcagtcctcttctctctctctctctctctctctctctctctctctctctctctctctcacacacacacacacacataccccacatatacaatatgattaaggatatatgtgaataatgaaagcttcttgtgtatagatttagaagtctaatggacaaaatcaatattttcctatgtgcatttaattcccccctttgatttaggtatatagtctttttttaaaaaagagaaaaaaaattaggtgaccttaaggtatagatcctactttcaaaaggtttacagaactagggagaggaacatggacaagatttaaagaactattttaagcagaataaaatgtgatttatgaacaaagcatatattatttgtgcgtatgtgtgtgtgccaacaaagatgcaattaggagattgcacagggagatgtcattagaaccaaccttaacgggtgagaagtctttgaagacatttagaacatggaagatctctgacagagggaacaaaggcatagtgacaaaagtcaagggcatatttaggactggagagtggtatgtgtggcttgagagtgggcgagaaaaaacaacaatgcctctgtaataggaaagtagacagaggcatgacattaagagctttgccagctgtgctaaaagtagtgaacaagagctaacaaagtgaagaaatgtaccttttctgatgtgtatcattcccttattcatatacttcttgagggggaaattcattctgtgttgatctagtaaactactacaggaccaaatgataaaaagaagtataggaaagaatgtttcagcatactttacgagataacttccttgtagctattctccatagtattttgagcatcacaaagcaatgagctgaaactgtctaagccaaaattgacttgtcatctgttagggatgcttagatgagaattctacatttgagagcttcttagattcattgaccactatgtcccattctaagatccatgaatgcgtgacctaactattacaccttcttttagtctgattgtcaattttgtattttcaattgtgcaagtttctaaaactattttaggaagataaatctagcagtggtgtgggaatagacaagagagaaggggaaagactcttcaggaaactaaactcacaatttatgagtattctttattgcccaagtcttcccaaagtctttcatcaagaaagaggcattgcaactctccttttatagtttgtttttattctggagcagtgatgttttggtggagttgttcctcagtgcgtaattaaagggcctatgacaattacagttcatctcctgctgctcaaggtactgcagatatttggatctactactctcattcatttccaattaatgtcagctttagatttccttcagtatgctatgttataaaatttgattatcgttgtgcccaccttcccacttaatttcaagcaggtttctcgattacctgactaaactaatgaaatctgactaacccaatatctgtggacagtagtgtgatgttactgatttttgtatgattagtcaagtcatattcatgccacgttttcatatagtaccataaaggatattcttctcgtggtccttttcttttattctgaacatacaatgagaagaccggtaaagtgggctaggaaattaaagaaaaatacaaatggcaaaaaatatgggtcactcgaagtctagaatagagagcacaatcaattttgaattaaggggtgataaggtgatttggtcaggtgactggtgaaacaggaaagaaactatactttttgaagtgtttcatccatgtgttaagattcatttggggtcaagaatctaaatttcatatccctgggagtggaaactaagtaaaaaaaaaaattatggaccttggtttaatagctagaggagcaagagtgtatctttatgtgacttaacttctatgtgaaaagtgaaccttaagattaattattgggggaatttacttactcaggttctatgcctagatggtctgcccaactaagaaaacttattttcctgttactccatcctatttttcatacttttatactgcacttgcagaaaagcatatatttctacccaatacgaaaattcctgggaacatatttttctacatttcccaaattacttcaaaaagtaaacttaggttatttcatgatctccattacaatggacaggtggccttattgaatgttgtcctgtgaatacaaagatccagagtttaaagaacaaggtgtacttgcatctcccacttagggtttgcttgtggtggagagagaatctagtttgcttaaaaggatgacagtgcagtgccccaaaatatctgatatcattaaaagtctcatatttgtctttcgtaacttctctagggctgtcgatgacaggagacccttaactcctatgccttgattatgtgaataagcacatgaaaatattttagttatcttagttcacttttaaactaagtttcaattatcactagattctaaatatcatcattgagccgttcttaaggaactgattttctacatattcattcacttcacctatatctagtgtgtctactatttgccaagaaaaatttactctcttaattcagcattccatatacttaacatcataaaaagtaggccatttttagttttctaaattatttatttaaacatttctttaaaattacattctatcattacactatatttcaacactacagtaagcagcctattttgtgatttttccttatataaaatacataattgaaattaaaaatgaagttaccaagagccattttcactctggggaatgcacatttataaattatggggttattttttcttcatcagctttcatattattaaactttgtctcttcataattacagagatgactagacacagaagggaatttaacatttggtgtgcatttgtctaacctatactttatgttagaaaatacatttccatttgaaaaaaaatcagtaattgtgggtgtgatcaagagggcagcctgaaagtcgggtgatgtgactcacacctgtaatcccagcatttttggaggccaaggtgggattatcgattgagcccaggagttcaaaaccagcctgggcaacacagtgagagcctgtctctattagggggaaaaaaaaaaaaagaggaagttagcctgaggcaatgtaaatgaaatacatatttcaaggatatttatacatgattcacgttattcatataaagatgtgccagagaagactataggtacgttattttacactattttgctaggattttaagaaattcaatgtgtttttatttcagttaacttagaaaacttacctaacttatacttctcatggacacaaaagtttttaaagataggatcaaaaagcccacatggtgaagcattttgaactggatgaaaaacatctattatctttaaaattttatgatattactgattgtaatagactccctttttaagaaatcattccttatagaacataaggtttacatttacaatcaacaatttctatccttactacaataaaggcacatataaaaagtacagttgcatatttagcaggtttaattgtacattttaatgtagaaatcaattcaattctttcatttatcagcattattacagtgatttcaaattaagcataggtaactttgatatagataaatgatgtacacagcagttaaattttattttcaattatgtagtaattgtataacctaggcagtataatttgtaaactttgtattttattattatgcttctcccacttggcataagcacaacacttcctaaaagcataattttctatagacttaataactccctaaaaacctgttttggacccctatactatttgatataggcagaaaaaaaacataatccatgctcaaatttgaaaaatgactggtcacatttggtataatactaaaggtaaataaaatcaagagtctatgaacatttccggacctgcacatttgttttattaaaatgcataattgtctttagtgtgtttctatttgtttatactctactgattttaattaaaaataccaaaatacgtttattaaaaaactgtcagaatctaagttgttaaatatacttaactaggaaagtaactgtttaaacgagataatttatagagaaatgtggtgtattgccaattagatgtcaagatacaatacaactgataatgaaaaagtagcattttcttagggatggaatacagtgtaaggaacaccccagtaagaatacaaaaattactgaaaaaaaatcttccttcctgaaaaaccaagtgcccttcaagtgcagaacctcatccaactaattgttaggtatcactaaagcctgataccttcaattttctggatcattcaagctgtatttttgagtccttatactagaggaggtaaagagctataaaaacacttaatggtatctgatgtgaactgtggatcactttgacccatcacttctacgtctacatcttggataaattcccattgttgtcatagattgtacaggtttaatggtgcgtttgtggagggggctcgcttatagaaaatggagactctgaagggataaggaataaatgtatcacttcaggtcttttatttgaaattggggtccagagagcctttttgtatcagacttgtcaaaccatttccatttagtaattatatatgcactagcacttattcctacttacctcacctctttatgcccatttccttgtagttgcggttatgcatgaataatttattgcaccccttaccaacaatggaataaaacttccattctgaaagctttccatactcatttccaatagcaatagggtttttttaacggacgtattacaaatgtacgagtcagttgaacatagtattcctctttgtaagaactccaagtggatgcatgctgttgtctcaaatctcaattagaccttgctttgaggtcccttcattgccagtcatctgttctccttcccctgacttgagtatttctccagatatagataatacattttcccaactctgtgttccaagaactgacagtggctttcattcattttgtttgtttgtttgtttcttctcgttctcaagtatcccgcagtctactgtttcttccctccattcgtttgtcctttcagagtttcaaaatccagcataggtacttcttctaaaatgtcttacccttcacatacacacaccacttgagaccccatcagcctctgtccacacagtttggttacattcatagactatttttatacatcaaaatatttgaaaattttagggtaaatctcagtagtcattcatttttgctcttattcaaccaatactagtcaatcagcctgtgccaggttttgttgcaggtaccaggtatccatccataaagaaaacaacgtccctttgttgtggaatttacattttagcaggggaggcaaagaacccaataaatatgataaaatatcagattaaaagtacgatgaaaaaaatcatcagggtaaaggaaaaagggaagcagtattttagcaagagtggtgaagagaggaggctgagagtgtgacatctgagcagagacctaaatcaagtcaaggaatgaaacatgctactatctaaagaaatgagtcaggataaggaactagtaagagccgaggcccagagatgtgaatatgctgttccaggaacagcaaagagactggttgatatgatgtgaaaaatgagaagaaaccttatgatatgtgtcaagagaaaaaaaaaatttaaaagcatgcttgggaacggaggcctccagatgaaaaaaaaaaacacagttcaaatccttgttcatgcatttagtttgctttgcaatcttgggcaaaatgttaaatttctgtacgttttatcttcctcatttttaaaataggcacaaggacatctacttaataggttcattgtgaggagtaaatgagatgatatatctaggatgcctggcattatatcatacacttaataatacactgaataaataatagttatgtctatttatttccttatcgtttttattattatttcaatgcacagacctgttcataagataatgataaatattagtggcagaaactgaagatgttataaattattaggaggcgggaccactcagttcaatgtatctgttttaatatagtcagcaaaagtgtgaagataccaacaattaaatttcaatgcattcttccatttcactagttttataaactgatgaactaccagaatgtcaatgtatgaattgcatactcattcttaacaaacagatttgcaaaattatgtgtaaaattagccctcagccttccaatttgttattgtcatatttcatggaaatacataatctgtaaatttttgttttaatgatatgtgaaactgcctaaagtagagtcttggcaactacttcacatttgtcctccagagatagtggataaaagtgtcaataaatgaacactctatattcactaatcacaggcaagggacaaggaacagagtggtcacaaaataccacaaaattaaagcacattccaaattaaatatatatgtttttattacagataatgtttgctagactctttctaattatctgcaaagattttaggaatgttttaatgttttaatatttacacacctgtgtatttcaagttcagtcaaacactattgttaaaactaaatcttctcatctctaataataagatgtgaacttatcttggaaggtggttattaggatgggagagataatgtatttcattcaaagtaaaaatatttctctgtttctatctttctctttctctgtcatctatttatcatctatatccaggtatctatgcacctatgtagactagcattcaatgaaccatagatattattagtagtagaattgttactaatattaaaataagaagtatttaagaagaaacatgtcctaaagcataaggtcaattattactctcatgttttttggcatatgaagcctaaaaagtgtcaatttcaagagagtattaataaagattgtgataactgaaaggttcctgcttgaaattttgtgtggtcttacaaatatataaactctaagcatttcagtgagccaattactgactaggcactatgtcttatgactcttttgtcatagtatgtaaaaaacaaagagtagagacatcataaaaattatagtagatgggcactagggaattacgcaaaataatttgtagatttaatgtgaaaccaaaacatctgttcaagtcaatttcccacaggtcatgtggcaaagagtatgagttccagactgaggagaggaaaaggttgttcttccacagggaaataaactgagtgtaataaacataatttttcttcttaagcattatttaaaacaaaaaaaatgccattaaatctatctttcctgcctctcttatcaatgctcccttccctttcaccacttgtttcaaactccaagccttgggattttattttggctttttgccttaatgtaactaaaatgagagcatcacaaatatgaagctcatcaaataatttagcagcattttcccctgtttttaactttctctttggaaacgtagatttcgaaatttaagggcccaaaatatgaaatgcaattataataggccatttgttcattcagcttgataaacttgaataaatagtattgaacttttaatgcaaaaagaacaaaacaaaatagaactctccacgaagaaacttttcaatgtttgcatttctgtgtgaggagaagggtaatgaatgtgggaaccttaatggaatccatgttcttccagtgatgacaagggtcaaaatggagaaaaatggtcactttctacccagtacattatattagttctatgtggacaactataacatagctgatgctggttttcaggccataaatgtaggtatgtattttcctactatttataaggcaaaatttctatttgtttaatgatttctatataggtagattattctgtctttaggattaaaaacgacctgtagaccaagagactttctaatgtccaccttagagtatatggcttttactgttacagtttccatttcctttgcttgcccctttgagagaaggaaaggagacatttgggatacatacatcaatgaggagctattaatgaataaatgaatgaaattgtcagtcaatttatccacatgatcatcaattgccaataattttatcacctctgtgggattaagtagaggtaacagtttagaaatttgattttttgaaagcatttaaaatgttcaaatatatcactctggtaactaagggaaagtgtattattttcttatgcttagtcttattttggttttgcctttttaatttaaattgaacacttatatcaaagagcttgcaggattataatttgaatttttgaagcaaagatcattttcttaacatcaaacaaagagtagatacaataggaataaaatcggcagaaaaacaagagtatcaaggacagacggggagggtgggtctgtgttagcatgtattgctatgaagaaatagccgagactgggtaatgtatttttaaaaagagctttaatcgattcatgattctgcaggttgtacaggaagcaggacaccagcatctactcagcttctggggaggcctccgggagcttttactcatagtggaagatgaaacaggagtaagcatgtcacatggccagagcagaagccagggggaggttgccacacatttaaaaaaaaaaaaaacaaaacagatcgctcaagaactcagctgctatcatgaggacagcatcaagctgtgagggatccacctccgtgactcaaacatctcacaccaggccccaagtccaacacttggcattatatttcaacaagaaaaaaagtttaattggctgatggttctgcaggctgtacaggaagtgtggcacaggcatttgcttggctcctggggaggcctcagggagtttttgctcatggcagaaggtgatgcccacacactttaaaaaaaaaccagatctcatgaaaactcactcactacactgaggacaatacaaaaccatgagggatctgtccccatgacccaaaaacctcccgccaggccccaccaccaacattgggaattatatttccacttgagatttgagtggcggcaaatatccaaactatatcagggctcatgtccagttatatgtcaacatgcctgcattcgaaacatcctgtccaaatcactgccttgtcataatacttatatttttctttattgaatacgaacacaagaagattaaataatagcatttctactttaaaacagtgggcaccatattaacattggaataatagtagtaataacgatagtaataacaatgatataggctgggtgcggaggctcacgcctgtaatcccagcactttgggaggccaaggcgggcggatcatgatgtcaggagatcgagaccatcctggctaacacagtgaaaccccgtctctactaaaaatacaaaaaaattagctgggcatggtggcaggcacctgtagtctcagctacttgggaggctgaggcaggagaatggcgtgaacctgggatgcagagcttgcagtgagccgagatcgtgccactgcactccaacctgggcgacagagcgagacttcatctcaaaaaaaaaattaaataaataaataaataaataataacgataaaaggatatgtgtaggttttttttttaataggctgttaacattaataggcattgtgatttcagggatatcatcaaacatcctggtcctaagacatcccctattgaataggaagggcttaagttaaacttctcatgagccacaattttctgattatatgtttggtgtgtgtaatagccacctcagtgatgatttgattagcctggacccttacataatcattgaagtatacccatgttcctttatatacttctttagtgttgaaagctcaaaattaagcaaaatagtccccttgataatgtttagattcttaacatttgctttctaaagctggcaaatactctcttcccagtgtcatgaagttaaataacatgttgcttagtgaggactttaatgttgccatgccataggaagaccttattcgaaatccccttacctgggagaatgtcagattattaccccccaacttgtttaacacttttaggattttaaaggtgttcacatttgtattagaacaaaatactattgagaaacatttctagaaaaaaattatctttccaaattaaaatcagtggtatgtaatgtaggagtctgattataatgattaaaatacatgggctttgggcatactgcctaggtgaaactcctggtttattgcatcactattagtataacctatgggagttaacctacgtaagcctcagttaatttttctctcaaattgatctaataatcgtctctcataggcttgttttgatagatatttcagtgtatataatatacttaggacagtgcctgatatcagtaagtctccttatatgctatttttctttctattttaattatttatgcaagagaaactattatgctttaactcaattaaaataaaatgcctttgtatttattcatgtcaaaggaaatatgcaagtattgcattcacttcctaggtgcctttttgaattgagctttgcatggttagtttgtataaaaggttcagtgaactttctcataatgattttttattgaacatatggaatccattaagtgttagcaaaagtcactatccactgagctgtgtccaggggctgacagttatgtctatctcttgcaaaaataaacacatacataaatgcactaagacgtatattacctgtcgtcatctcttagagcatttccatttttcttttaagttttttctttcaatgggttttttatctttgtgagtacatggtaggtgtatatgtcaacggggtacatgaggaaggtgtatatattgatggggtacaagagaggttttaacacaagcattcaatatgaaatagtcacatcatggagaatgggttatctatcccttcaagcatttgtgctttgtattacaaacattctaattatactctgttagttattttaaaatgtaccattaagttattactgactatagcaaccctattgtgctatgaaacagtagatcttattcttatttttctaacatcttagaacatttccacaaacactacctgcttgttaaatatacctattctaatcttcatataatcaattacttttttcctctagaatgtactatgacacatccatggggaaaatgtagtaatctaattaagactatttcctctcattttatatttaaaagaatgtgctctatcaatttatttacttgtacagccgtaggcaacctctaaaatatttaaagttcttaaaagtcagatatttcagttaatattgtgattatatagttgattttgatgaacatgttcatctaccagaaataaattatacacacacattgatatggttaggctttctgtccccactcaaatctcattttgaattataatccccgtgtgtcaagggagagaccaggtggaggcaattggatcttgagggtggttttgcccatgctgttctcctgatagtgaatcatgagatcagatggttttataaagggctcttcccccttccctcctcactcattctccttcttgccaccttgtaaaggaggtgccttgctttctactatgccctttctactatgcccttcaccttctactatgattgtaagtttcctgaggtctccccagccatgctgaactatgagtcaattaaatccctttcctttataaattacccagtctcaggcagttctttattgcacatatatgtgtgtgtatgtgtatgtgtgtgtgtgtgtatatgtatgtatatatgtatacatatgtgtgtatatgtatgtatatatgtatgtatatatgtatacatatgtgtgtatatgtatgtatatatgtatacatatgtgtgtgtgtatatatgtgtacatatatatatatatatatatatatatatatatatatatatgaacagagagagagagagagagggaggaagggagagagggagggaagcatggagaaagagagagtaatagcctaaatagaaataaaactagctccaagtacaggttcgtcaacactctcctatcatacccccaccaaagttaatgttaaccacttggagccctgttcttccttagttgtggagtactttagcaaaattttaaatctaattatgcctaattcaacgacagtgctaatttgaaagtgttagaaactgaagacctataataataatgagagttacaaaacataaatagtgagacaatgatgaatgtagtggatgcatgtacgagggctatcatttgacagtagagatgatgctcaaggacagacaatgagtctttcaatgtgtggagaatgtgctgctgttacagtgatgtacaggaaagaaacaaaaactgaggaagtatcagtaaacaaaacactcaaacatatgagtatacagctagaataaaagcaacagtactagatgacaataagcccaatgttaactcagaaagcagaaggtttttaagaatttggggaatactgtggctgatgatacttatgtctcaagccacagatgccatatgggctctgcgcccagttgaatcggcaccacctggcagtaagtgggcaggtccacgactgccaggacatcccttccaacacttgtggagatcaccaggaaggggggagagacctgccttgacagattttcaatgtgggcgaaacaggtctattttgagaaaagatgttcaatagaacatatgtcagcaaggaagaagagatgatgcttagttctaaagctccaaagagctggcttacactccaacttggggaaaatgcatccgggaaatgcaagattaatctcatcttagccattcttttgaatggatggacatgacccctttctacttgaagacagaaaacataaccatattgatttcaggttttcttcattggtttccatttaggattgttcctccccatcttctttctgtgtaggcatcccagttcccaagtgttcatgaagcacgtatggccttcaggggatgtgtctgtatacattgttatcttatggatgcacggttttgtctgcaccttggttctgaatgtctttactcttgagcatctgcccatgggtccccttctcaaggcctcaatttcttgagtttaacactgcatggcccatgcagcttttcagttaagcatctcttgctatgaccaactcttttcctcagtcaactcccacactcttttcagggacaggaaaaatgtagccacttgctggctgcactctgaggcctcaagaaatttagtgaatctgcctttgcccttcttgctgatgaaatactgccacatcaggccccctcttcggaaacctacaagcatctaattttcttgcttcctccccaactttctttttgactcccccccatccagagagttcttatgtctactgtactaggaaaaactcattcttaaggtatggttttcaaatcattctctggtctggactttagctacggttttaaatgaagaaacaacccagagccaaaatataatgaaactatttccttcttccacagagtggaaactgctttggggttaaagggccagtgaaccaaatagaaaaggatctcagggaacacagattgaagagagagaagaaaaaatatgaaggcattgttggttctcttttgagtttaaaatctagtggggattgtaagcacacacacatatacacacacacgcttacacacacacaccagtgaagttatgaaggattttgtcactccaacgaccttgaatttgattatctaggtcagttgttaccaaagtggaatgtacatgcccaataatatgcgtgctaaacagttggggtagtgagaaaaaatactttttatttatcttgttctctagaaattaatattttgattgtatattttatagtgtatgtgatgtgtaagttgtgtctacaaaactagtgtcaatgtaatttaaaattacatatgtctgtgaatatatatttatatagggtacatgcttaaaatgtgtttacttctgaggtacatgaacatttttcccccaggcacagaaagacaaataccacatgatgtcacttaaatgtgcaatgtaagaaaagttgaattcatagagatgtagagtagaatcatggttaacagaggcttgggaggtggagtgagggaatagagagttactgttcaaagattacaaagtttcaactagacagagggaatacattttgagatctatttcaggaacattttgagaccctcactctaagtaataggaaatcattactttagttaacatatttgaatatgagttgtgatgttctatatcgtttatttggattctactaacccacacctagatttttatggcattacctttttactcactgtgaatatcctactcatagacagatgccctgggaacttggacttgaggcacccaagaactgagacagtgagatttgggggcacaaggatctatggataagttcatcttagtgatgataaaatcaatttggcatgtttcacggacagtgtgcattttagaaagggtaaagacttggaaacgggatatttttgagcccaagtgtttccaataaatagctgtataatttgaagcaaataattgattttttgttctctttgtgccctcgcctgtaaaatgggagaaatgtattcctttctcatccttctcatgaggccattgagagtatctaatgagatcagactgtgacatagcataataattctcatttcttgaaggcctattatacactttgcaagcactgtatgtgttgtttctacttctcttgttcgtttttcctggaataaatatccccccctcctttacattggattgccattattcaccctgtaaggaaggcttcatggttctcattttcatctgagaaaacttaggctcagagaagatcagtaacttatctaaaacacacacatacacacacagacatatctatgcccattattcttaacctagtttctctattcaggagttatctctgctgtctctgcttctgattataatctgtgtaagctgatccaagtgacacgattacagggaaattgtaagccctttgagagcagagactacctattgatatctacattttaaaatttgattttagccaacctgtttatatgcaatgactaacaggttagtttgacttgcaataaatattccaaatcctagactaagtaaatttattaatgtaatgatttaacttgattttttcattggcatgtttccctgaagtcgtcatgcaaaattgaaaaaaaaaaaagtatagtgtgtgattctagattgaaattcaggaatcctccagggttaccttgtttgctttccaaatagttcagattgcttagtctgaccaacaaggtccctgacacttggaactctgtctatccctctaattgactttgtccctgatgacctcgcccagagatactcttcaccccagctatactgtgttgctagagtttctctgatatcccatgctattgtttcctttgttctcttcataaggtaccatttcccacccgccaactcctgttttcctgatggacttttgtttcaccttacaagatcattgctaatgtatttattttgagaataaaaagtgtaggaaaggtcacgggacaaagctgtacaccagacctttcccagacgaacctagtgtataatctccctagtccaacatcatggcttaaggcagtcgatagatccgtcttaatgtcccttttgagttttctactattattatatgaggatttatttttgtctgaattcctccctagatttgccctagagagcaatgactatttacagtttattcctctttgtatctcttatgttaaggccagaccttggcacatattctagctgattagaagacgtttgttgaatgaccaagtgattgaacaaatgaccatgtgctctgccacagtccggtcagttctactttggtttggttatgtgtttgccacattaaagttgtagcctgggaagttcagttgtgagatgtctgcagaacatgaaaaattggaataatgaggttatttctaaaattgctataatttaaaataaatagtggtttattccatatatgaatatacactggaaacaaagaatttctagaatactggagattcaatgataacatcattgaaattaaataaataataggattatgctagttactttctaatttactagaaattgaccgtgtgcatggcacgtataatgagtatcatgggatagttacaaaaagtggtgcttagtgagtttctgtggaaaatctcggtaccaataaaacggaggatttccagaaatcgatattcctcaaagcttgacagtatttatgcacggttacactttgtgtgtctttcgtttgaatcaatggaaggaggctataactgaaaattattgttttagtgtattatatctttaataataagagttttaagaatctatcattagaaataattattcctcaatttgtaattctcaacatttgaacaaataaatgctctgtgtctatcagttaatcttgcccatgaagatttaataaagcacgctagtttttacaaatgtgattttagagatggtcattacttggtaaaatattttgtgttaacacttccatgaatatgttctgtgggaatatactgcctccacattgcttgctcatgaagacatgatttttcacatcatcctatcagtattttgagaaagagattgatcccatattctatgagcatttgaacattctctagtatttttgtttaatcattaaaacaacccttgaagtctatgtgctacactggttatttccctcttgactttcctttacagataaccctctatcataaacaacctatctatatttgttgtctccacatcatgttgccagccctgctttaacacactgcacattgacttctagcagcaaaggctcatgggaggtactctcatcaaggacactgatggtcctcatgttgctaaatttggtgggtcctctacagtctttatcctagttcaccttattatggaccactgtcaactctgttctgcttaaaacactctgttccttgcttatatgactctacactcttaactcctttgtgaattcctcatctgcccttccattaagtattgacgacatccttcatagttttgatctaggacctcttttcctcttacttgacattatgtgggtaatcttgtctttgaacgcaattaccattcttatgttgatgacccttaagctataattccagcccaaatcatttttctgaggaagctacaagaatacacaaatgtctaatagatctctatttagatgtccctcaggtgcttcaagcttaaaatactcacctgagctcatcacctcatctataaattctgcttctcctccctggctccctgatttatttaatatgaccaccatccacttagttgaataaagcagaagcctggacaccatctatacctccaattaatcactaagttttgttgttaaatacgttcttacattttctctctagaatgtcttattttccccatctttacacccaaaaccaaaagtcagatgaccctgatctcctgcttagatttcaaaacactatctcttgcctagactctggaatttcagtcttgctcctctccaatctatttctacaccctagactctggaatttcagtcttgctcctctccaatctatttctacacaaaagctagagtaattttttaaaaaacaaaaatctgaatgtgttcattttctgcctaaaagccttcagtaattcttatttgttcttccagggatagagtaacaactttcagacctagtttattagctagttctttaaccacaaaggactctctcacttgtctactccccctaacacacttcgccctaacctttgccattcctccctttcccttttccttcccagatggacttaagtcctttcagattcttaaatgtttcttcctccagtctcttacatctcttttccttgtaactctaaaaactacttagcttacgcaaggaaaaaggtctgtacaattcccggaatcagcgatcctaacgttccctgttgtttttttcgttgggacatgaattcattcacagtggctctaaacatcaccacccctgcctatctctcccattcctactttatctgagcttatccatactcttgaagacttacatattttttttctaccaggaaatcattactagccttattatcccactgtccaaaccaataagtctgattaggtatctgtatatatttaatattactatatgtgtttttctaacactctagtagaggagaaggtgtatttctttctgttttttagaagcctgtatttctgctattatagctcttaaggaactctcatgcaattgcctactagaatgtaagttacggtaggataagaactggatcagtcatatcacacatccacatataggacctagcaccatatctaacacacagcaggtactcaatacatttctttcccaaataactaaagagtttaaacaaaccaaaatgattaaatgagaagtaactgttttggtaattcttgtgtccttactagagtctaaattgagtgatttttatatcatcagtttatactcccctttcccaaccccaattctttcttttttaaattttttaaatcaaatatgccttaaaacttcaggatcagttgagtaaaatgatgcttttgtcgtcttttgcaaaataattgtatttcagaattttgatttagatattataaacacacctaaaataatagctttagtcttaagatgaagtgcttcttaaactccctaagatgggttggactatggatatgaacatggacaatatcacattaatttgtgtacacagttctaacacagggtctggcatataagaacaagtcagtaaatagttgttgaatggaattgaaaatttaagtagcaaataaagtattttgacctacaaagcaagaaatcacatttttctttttgtcacagttccttaggaagataattaattttttagtatttaaggatgttaaatatttattttatgttctatttactaggcttctttttatgaaaattaattggtgaaaatagcgtacatatcttcctttaccagaacatttacattttgggcagtaacgctggcttttgttaaaaaagcaaaatatgtgtgaaatttatgtttgagttgatttcaatgcattacatttccattttaaatcttctttgaaatactctatttttgacaccatgaaactgtattagatcttagtatgttagcaatgttttgcagttttagagccataattattttaatgaccactttcagcatatacgttttctacaggaaaaataatctcaagaacatgaaaagtgaaatctatattttgggtttcaaaatgatacattttagctaaaatatcatagttttaatttctcagtgaaaaatatagtgtggtaatttatgaagagactcagtgtttaaaaattatgactctatagtcaagtttatgtttataggacataggttattcaattacatttaaaataattaatttagaaaatgtgatcaatgtaacaaattttacctgttcttttctaaagctaaatttgttgtttgaagtgtttcttctaaaatgctaatgaactatcaatttaattgttgagcttagagttagaaacttaattatattgccagaaataaagaaacaaatggatcccaaaagattcacacattagaaatgtatgccagggaaatgcttttgaatgtgttcaagtcatggcttctaactcgtaacttataacttgtgttatgtctggcttcattcccttaagaaaaaggaataataatgccttcggagagcatcccagctgtaagagctatgcattggtgtctaaaaaagcttctcactcctcataccatcctggtctgggaatttaaaaaattgtcatcttttgataatctgtatcacatagtcttctgcatagtcatatgaggttagaactgccccataacttttgcagggcctatagtaagtgtgcaaatggttgcctgcatgccacatatttaatatttataaggtataaagtcaacagactattaaatatatcctatctgctttccttgacaattatacaatcataatgatatggacatctagattcgatttagaattctctctctctcattttctttttcttctttctttctttctctttctttctttccttcctttctttctttctttcttctttctttctttctttctttctttctttctttctttctttctttctttctgtctgtctgtctgtcttgtttttttaaatagtgcaagcagtttattccctggcaaggaatttggaaaaaactcaaatagcaaaccacttgatacaataaaataaattccttagagttttgtactggaatgaggcagcttggttagagctaaccctaagcctgttatttaggatacattggcttttcttaagcttaaaaaaaattttactgtgttaatgacatttaacatgagatctatcatcttaataaatactacatgcacaatacattattattgactctaggtagaatgttggacagcagatctctagagctaattcatcctacttaactgaaatgtaatgtctgttgattagtaacttcctatttcgccctatccccagcccctggcaaccaccagtccagtctttgattttatgagtttgactgttttagataccttatttcaagtaagtggaatcatgcagtatttgtctgtgtctgtcttgtttcacttagcgtaatcttaaggtccatccatattgtttcatattgcagaatttccttttataaaggctgaatagtattccattgtgtatatataccacatttatctattcatctgccaatgggcatttaggttgtttctgcatcttagctattgtgaatctgttgccttttttccctacctcctttactccatcctgcactgtgaggaactctgtgcacatagatctggtcgccccatttcccacccacatgttcaagtttttcccactcacctcatgcaaagatttaccccttagccatacccagtaactgactttgaaacatttgcccagggagttgagggattctgaatgccagatcatgggagcggggcttctagtgagcatgttggcttggtcctacagactcctaatcagagctttgcctttgaaagcatggggcccaagggcaaggaccctacttgttaaggtctaaattttttttctgaaataaccacatcgagcttttatgtgtagatggcctaaattgggctaacccagaggcagtgacactcaagtagtttacatctaagcgctttccatgtgcttcttttcccatttctgttacttcttacaaaataaaaaatcagcatctcaattaccctgatttgatcattgagcaatctaaaaagtatcaaaatatcacatgtagcccccatatacatacaactgttatatatcactataaataaatatatacacattatatttaaaaatcaatactttaattttacatgtttaacaaatcactagcatatacattccagattgaacttacgagggatgtggaaaagattcagtgactaaataacaataaagtactctaaaaatgaaaatgtgaaatggagacagtataaatctaaaatcatatcacttatgaagtattgtttcaaataaacaataaaatatatcttcaatcaatttaattttattttagttgtataaaatctttcggtcagcattaacctaattggaacactaaataggtacatctaaaaaatataatcccccccaaaaatatgtagctcataagagataatgcattgaacacagataatattggcgttaaaaacagaactctaccacatttgcaacgaaatgtttatctgttcttcctactagaaaataataaaatagttctgcatgagcttgaactcgaagtattaggtgtacaaagaccttttagtgaatgaatgctagctgaaaagcaaattttaaatatgaaaaattagcaagacaaacatttgaatttgtgggagatgagtaaaactcctataaaaatgaattgtttagtgttaaacagattgtgtatgaaatattaatggcatattgtcctgagctccccttccgctgtttccatgtagatgactgaatttcaaacagaaatatgccaggaatgattacgtgaatgaatattactacatgagattgcttaaagagtatttcttcttttgccttctttttactttcgttatttcatttagtagttagaaaatactgtctacaaatatgtgagaactgcttaatttatttttgagacattaattaattcaactaaactatattgactgtgtgagagagattcccttggtgaatatgtggatttttgcggtggtaagaactctcctctggagcgcaaatggtattgctctaggaataaagcatatacctcaggcccagatgaaccagtgcaatctacagtaacaggttcaaagatgacctcatgacctactgtggactaataaaaatcaaggagacctactgcaaaggtttctgggaaattctttttctcttgcgttgaactaagtaatatacatatgtgatagttagagctgcagcctttgtaataccatgacagaagataacctgaaataaggctgacagacacaagagggagacctaagagtactgagagatatggagcaggaccccctgattgaacttcacttgcagcccccttctgcagttttcaatgacgtgaaccagtagaatccctttgtttactgtttttgattaatttgagtgcagctttatgttatgagcaactaatagcatcctcactgtcacaactgccctctatacggcaggcactttgtgatactaaagaaagcagtatacagagtagagcccagtgaataacagggcagatgttgcaattaaactgcctgtttaaattctagctcttccactagctaacttgtgactatctaagtaatttaaccttcctataatcatacctatcttgaagacttgttgtaagatttaaagcacaacagtgctactataaaacaggtatacagtaaagcttagctacttttttattaggccatatgatatcatttcattaaaatcttatagccatgctataaggtattatgatcctcaatttataaataagacagctcaagttttggtcaagtgactttaccaaggtcatagagctagaaaataatgattccaagttacaagccaaacctcttcaatgccaaatttacatcatcccccattacttgaagtgtaagattcacatggacagaaatttttgactgtttgatcactgctatctccttatcatctaaaacagtctctggtccatattaggtgttcaataaatatttgtagagtacataatttccttcacagactccacaatctggtgaaggaggcagacatgtaagagaattatttcaggattccacagttgatgctgtaacagagctaaatataatgaatggaggaggaatgaataagtttgtctgggagcaatgctatggctattgaaataagtcttgctcatgctttgattgaaatggtggatatagatcacacaacaaataacaattagataacagcttgttgggagaaagcgaggatcagtgtttgccataaacatttctcatagctaatgtcaggtgtttgatttctcaacattttatatctttgactttgattttctctgtttttattttttaactccattctcaagaagtctgcacataagagtttcaacatctagcacttcataactccgtcatctcctctcaggcttagagcaaattctgagacgtggatttatcgtcgagtgatttcttcctggcattttatctctgagaccaggatctggttgctaagcatgtagacatagaaatgcatttcttcattgaaccccataggttcaaactagtggataatgagcacaatgtcaatgtgattatttgtaatgggggaaaggttaccggagaatattacacgaccatccacatagactaacattttcctcatgactaagtttacttagcaaaacaaattaaaaacagaagtttgtttagcagcacagaattgaaggaagacaaccagatggttatgaggaagattcatccaaactatgccagaactgaaagaaattaagttcattcagtacaagaattgtctagaataagagaatccattttgtgtcagcacttcccaagttcttgttaatgctaccttaagttcaattcaaaccaggcagcatttattacgtgttgtgctgggtcctaggaggaccgcgttttaagaacttactgtgatcttctagatcaagtttttatttcaatatttctacctcatttctgattcttaggtgttccttatttcccaatttatcccctgcagaaattgaggcaataagatgtctatcttattgcctatggtgttgattatttatgttatattctgttttgtgaagtttgacctctacctaattaaattacattttcaattgtatcttggattgatttattcaataagtattctttaatatttttgcatgaggtcggtcaggtttcatcagacattaggaattaattataaaaatctctagattggtacttggagcttaaaggaataaggtggtggaacgttaaatgaggaggaaagaaccagcagagctgggataaaattcatctctatcatcttcccacctgcttgatctctggcatataatttactatccgtgaacctcaggtttctcttcagaaaagctgcagggttgttgggggaaataaggcaattcctgggcttcagtatgttcaaaacagagcattaatattattatagacttttgatgatttacacaattttagctttttggcaagacatatttactagtactaagtaaaagcacgttgactttctaaaatgaaaatgtgtatgtgaggatgaagaaaaagaaagtgttttgtttgataatatagcattataacactgcacaaaaaaaaaatggtatatgcagagacttccatcacttgcttatgatgccgcattgggatctcattaataagacacttcctcagacacttcctttgtgttcaataaatttcaatttcctcctttccttcagttcacttcaagaaggacggcagcaactttcttgttgccaaacctgacaaatgttttttagtgctgattatactcgagcattctgtagcaaaatgctgtgggtgaaaatgccttccttcttaagggaatttagcttctgtagtaccagaatctccttgttgaatgaacatgtactgcctaagtcttagtaatccctcctttttgagcccattttctggcatctctccctttaatattcctcaaaaagttggatttttcctggacttttcatattacagactttcctttggtcatcctcatccattccgtgattccaactacattttccctccatcctggcatcttctttcttccagacttgtatatgcaactgcttccattcatacacttgaccaaccttttaatttctataagatcaaaaactcagctcacaagctttcccctaccatcgagcggggttcttcttttgcttctttgtttcagacaatggcaccaccatactcgagtaaggcacgttcatttatcaggtcctaccaaatctacaataaactctcttgaatttatccacttgttttcatttgaacagtcatttctttacctgggtagcctgcaccttctacctgcattgattcagcagtctcttcaccactggctctccctccctctcctgcctctcttcttgctccttcaatttattctctactcttcatagtgacttttattaatgcaaatatgaccttataactcccttgcttaaagacccactcatgtttgtctttgtatccataacttccggcctagggcttaacgcatagcaggtgctcagtaaatctgtggtagatgaaagaacaagttgtataaatactgaatggtctgatgtgctctttgttgtgtcaagaaggacattttgcagtcaggatagctacatcagtcctttagtaggcatttgacagcactcgcattattcctcaagagaagatggatgtattgattctgtatttcaaatgacataacttttgtgaaataagaggctgccacggtaatctgagggatctctcaagttcaagggactccacagtgctttgtgtaaggtaacaggctaaagggttcagtcttaaactttcttaagactgtagttcagggttcctatggtggggctataaccctgaattacatcctctttcatttcatgctgataatgagaactacaaaccaaggggtattaggaaagaatccaggtttgatgcagggaaaaataaaaacaactgataatctctagtgtccccaacttcaagaattcctttcttctttacaccaagctttttttctctgccaggacttactttgtcttctacatgtttaagggagaaaaatgagttaacagaaggggaggtacagcatttctatttacttagatgctagagaacaggatgaaaggtatgaaaaatatgaaagtctctctctctctctctccccagccttcccccgcttctctctctctctctctctctctgtgtgtgtgtgtgtgtgtgcacgtgcgtgtgtgtgtgtgtcataatactcaacctttcttttctttcaagcatatgttgtggcagagacaagtgtacatcaaaattcgtggtccctctttcatagtatagagttcttgctaggatccagctgcaagccagcaactacatttcccagccccactggcatctagttagagccatgtgactagttgtgaccaattgaatgtgagtgggagttatgttgcaggcataccttttccatcttcttacttcccatttgctaaccttatggaaaagagtcccaaagacctaggagatgaaaaagcctaaaatggaaggactcagagtccctgaattactgggtagagaaaagctgtttgcagatgggaatgcccattttgtagtattctttcttttcttaagccactaaaattgtgggatctctttgttatagctactggcattaacctcttacgtatacatacagctatgtgctacaaagaggaatagatacattttttaatcgttgaaaggggagaaagaaacatatttaggaggaaaataatttagtctctacaattgaaaagtgttttatgaataatattttgttttggcagcatattaaatctcaggcagctgaactacattaattttcaattctctatatatgtttttgtcttcagggtttagtaacactgatatataacagtttctttcttttaatttccaaatttaaatgtctaagtttgccttctaggcagaaattaagtcccattgtggaatgagattggatcaacacttcaccaagatcattttagttctttgtaatcttaaatgaaataagctaataaagcattaaattagcatgttgtaaaacttcgtgaagttttaatatgcttctaagtggcagctcttagcttattatctctaaagctaaagtcaaaataaatgtctcagttgatgaaatggagatgaggcaacattttatcaaatttaacaaaatattttatatctgaattataaagtccagattatctagtaattatcatataaatgtatttaaccagacatgcatttttctctaatcagtagccctggagtctttggaccacaaatgtgccttatctcaaatgctttaactgtgacattttgctttagactagctcgactacttctacagaaattatacacttcattcacattcatccagatgaaaaaaatacatgtagaaatgatcataataagtaacatttgtttaggatttcagagtttacgaagggtttttctattcactttctcacttgttcttcatgtaaactggtttggtggacaactgtcattatccctgttacctggagcccctgggtcttagggagacttcttgacttctcaaggtcatgaaggtgctaactctgaccgtgtttttattcctactgtgccacacttctcaggtaaaaatcatattgcagacactttaagagaagtacttaagaaaataaattcctccagagaattacatttaagttgtttcattaactgcagtgcataaagaaaggaaaagtgttcccaaacccatgtagtattttgctattgcttatggtaatattctgcacacctaatattgtcagcataattttccatgtaacaaaatgtcctaaatcagcaatgtccaatataactttgtgtgatgataaaaatgttctgtctctgtgctgtccaatacaacagccactagatacacatgactactgagcaatggtaatatggccagggacactaaggaactaaatttttatttaatattaaataacgtttaaatttcaaaagccgcatgcggctagtggttgtcatcagatactgcagttatagaaaattagaatttacctctttaaatactaaacctatttttaatagtaggatttttaaattaaaatagttctaagtgcttttaagtgatacgaagtcaaatgcaagatttctgttttaatagtactctcaacccagagacaatcttcatgcatccttatacatgttctttgttgccttattctagttttattttaacattaaatgcctctgttctacttgatattgacttgcttcagagaacaccaagtatagtggaaagaaacacacacatgaggacttgaggctaccaaccaggttcaactaaatgcactctgatttaattgtagtattgggatcccctgttgcatttattgaagaagaaaaaaactttgcaaccaaaaagatatttgaaagcaactgttcttcttggacacatgatccctcataaagtggggcttcctgcttttcagagacttaatttctgttcatattcatttcagcaatagtaataatgatgatggcgatgatgataataatcatgatgatgcctaagtgttgtagtaatgcttcttctgagccagacgttagtcaaattactttctctacattaattcaggcaatcatcacaacaatcccacaggacaggttttattattatacttatttagctagcaaatgatataactaggttaagttacttgcccaaggtcatactgccaagacagtggctctagtgtccctgcttctgaccatatgttatgctgcctatcctagagcttttctcttctaaaatagtaaaataatatattctttgtttgtttcatacttttttttttttttttttttttgagagggagtttcgctctttcgcccaggctggagtgaggtggcgcaatctcagctgactgtaacctctgcccccaccaggttcgagtgattcccctgcctcagcctccgaagtacctgggataataggtgcccaccaccatgcctggctaatttttgtgttttcagtagagacagggcttcaccatgttgaccaggctggtctcgagttcctcagctctggcagtccgcccgccttggcctcccacagtgctgggattacatgcatgagccactacacccggcccatacataaatattttaagcgaagtacacatgcatgatcatcatacttttaataatttcatttaactgtttccaaagaatgttagtatgaggttttctttttttctttttataatttcaacttttattttagattcagcgggtacatgttccctggatatagtgcatgatgatgaggtttgctatatgaatgatcccaccacccaggtagcgagcatggtaaccactagttcttcaacccttgcctgttcccttcctccctccttcctctgtagtccccagtgtctattgttcctgtctttatgtccatgtgcactcaatgtttagctcccacttttaagcgagaacatgcagtactcgttgtctgttcctgcgttaacgtgcttaggatagtggcctccaattgcatccatgttgttgcacaggccatgattttgttagtttttatggctgtgtagtattccatggtgtatacgcgccacattctttatcctgtccaccattaatgggcacctaggttgattgcatgtctttgccattgtgaatagtgctgtgatgttatatgtactttttggtatattcaaagagaaatgctattttcctcttgacatatttatgtcaatttaacatatttatgtcccttttctttttaggagcaccattctcttcctttaacattataaataaaatattttttgcttttctgtttttgtaagtgcagttttattgacagagtgagacatacacgtcgatattgtgactagctgcatgtcttctattatttagaggtctcactcaaatgtagattatcaaattctgttagtgaagagggtagaacagcagaactaatgctggtttccttctctagcattatttgatgataaactaagatgataataccccccaggtcttagatacctgcagtaggacaggcaccctacatttaatgctcctaggaatccttcaaagtgatagcatagttattatacagtaattgagaaaactgatgttcataagttagaaatttttccgaagttgcaaagaaagtgaatggaagaattataccaagttctggccgggcgcagtagctcatgcctgtaatctcagcgcttcaggaggccgaggcgggcggatcatgaggtcaagagattgagaccatcctggccaacatggtgagaccccgtctttactaaaaatagtaaaattagctgggcgtggtggcacgcacctgtaatctcagctactcgggaggctgaggtaggagaatcacttgaacccgggaggcggagtttgcagtgagccgagatcgtgccattgcactccagcctgggcgacaagagcaaaactccgtctcagaagaaaaaaaaaaaaaaaaaaagaggattataccgagttctctttgattccaagcccaaacaaatccttttttgcaatatatgacattgtttccctgtttgcattccccattctgtgtatcacacatcctgtggcctgatcaaaattcattttcagattctgaatttattttccattgaatctatataaactataaagacagaagatatatgtatgtgtgtatacccacgtttctcttccagtgtcaactgataaaaatagatttcaaagtctcaataacctttaattccctttttctcttaaaaattctttagaacttgtacatgacattctgactctagcagattttagaaaacagagaggccattagatattcataccttactattcagatgaagtattcaatgctaaattatgtaatttatctgctttgcaaattgtatggtcagattgagttccacaaaggagagataatttttaatataggcattctgtagcttccctaattattgaattagtttagagcaaaatccttaaattgtatcgttgctatgctcaaattttgtatacttgtccacgtaggctatattaagatttcattgaattttggtttctttctcagtgataattcaatatatcaactcaccactcagatttgcctttgggaaaatccaggccccttttctggatttttagagcagattttaaaaaagtgattctgtatatgtgttgaaattaaccacatctcattgcttttgaatgattgaggtaatgtatacctactactttaaaaaaaatgacttacttagaaggtgtccatagttttataagttccattgaactggtttatattgtatttagaaaggaaaactactccttttatccttaagggtgaaaacctggattttattatacaattaacacatatttattttttattatgaaatatatcacaatataaacgtttacagggagtgtttaaagtggtgttgtccaatggaaatataatgtgagtcaaatacgtagttttcaattttctactagccatattagaaaaagaaacagagaaattaatgtaataggatactttatttagcctagtatatccaaatcacaattatttaaatatgtaatcaatataaaaattactaattatgtatttaacctttttctttagtaagtctctgaaatctagtgtatattttacatttatggcacattgcaatttgcattagtcacatttgaattgttcaatagccacaggtggctaatggctaccgtgttggacagcacaggtttaaagaataatatgaacatctgtgttccaacattctgagtttcaaataagaagaacaccatcagtattttgggagaagctccctatgttaccccttgctaatcaccttccttccccccagagccaaaagtaaccattatcttgaatttctagtaaacaatgctcattttttaaaaaacgtatgttcaacacctgtatttgtatctttaaagagtagctagttttagtttgcctggatttgaactttatattaagggaaccaccccatctctaatcttctctgtgaattcttttctctcaatactatgttttacatatttacgttcatcaatgtgcaactcattgtatgtatataacacaatgtatatattttacatgcgtatggacatttgggttgtttttatgtttttgttcatcacaaaccacaacacacatgtgttcttgtatatgttttatagtgcatgtttaaaaatttctcaacagtattcgctagtagtattgtcaggtcatagggtatgcacacataaatagaaatgattgattagctgcaatttgtagtgcacacatatttgctatgtaagtgatccatgtttaagactttaactgaatttaaaaaatattttattggagccaatctaaatgagctaagggtttgtattgtttacataagcaaagattacacttactgggtcaattcggttgattaactttggatatataaaatatatagctagttgttaaatagatataattattaattggcattacttttgtttgtatataaaaatttcaaaatatccatgacttaagcaaggtaaacacccactgggtggcttaagcaacagaaatgtatttcttgcagttccggaagttgaacgtctaagattaaggtgatgacagggttggtttctggtgagtcctcccccattggcttgcagatagccgccttctccttcatgacctttcctctgtgtatgtgcatcccttgtagctgttcttccttttatgaggacattagacttattggattaaggtcctacccatatgaactcatttaaccttaattacccctttaaaggccctacctccacttgcaggggttaaaacttcaacatatgaatggggttgaggagacctacttcagtccataacagtttctatattctgaagatggtctttaattaactaaacagttaatgttactttactgggaatgtcttttggatgggggaataagctgatgatatgagaagggttggtgaatttctcataagtgtgaaatttgttgggccggcccagcatgattttcaatcaaatacgctttggggacaagtaggttgaatcactacgagaggtttaaaagaaagcaagttgtaattgcaacttttaattgaaagaaagacaggctttgttgatgtgccagcaagactgataactggctttaacgtagatagtaaggcagcagattcaatccactgatcgtgatctactagtgaatttcaaagccttatgcaatagaactacaaaccctttccttgcccaccttgcaggtggatccataggcaaaatgaacatttgcaaaaaagccgctatgtttcagaatttgtgctagggctttaatatctataatttctccaaatcctcacaatttaagaattaattcaacttagccccatgaatagggtgaaaattctgagatttaacaaactaaaataagttatctgaagacagacaaatagaaagagttgagatattctatttgaatgtaaaattttcaaaaagtagaatgacagcgtcaggaattacagtctcagtgttgaacacaagacttaggaacaaatttgctgcatgtaatttcattgagatgggacaaagtacagcatacgtaaggaagttttagaacaaataagataattattttacgagctttgaaacatgtgtaagaaagatacgaataaaagtataatcacatttgactaaaacatgaataccttaaaactgaaaagcactgagattatcattatataattttgaatattttaaaccacaatgctttgggagtgcactgtaatattttagaattggaattttaacttactggcttaaaaagtaatgtactttgttttaaattcaaagattatcttgtaaattcagttcgatctattgaaaaaattataaaattcggcaagaagccaaagaagaacaattatgtagctcaagataattaaattttcatgtttggctttagaaatatattcgtcgtgacatagtacatggtaatctagtgagcccagacaagtagttttctctttttgtcaaagggaacaatttgatgcgtgttcaagttgcttaaataaaattttgtatgtgctttctcatcacaagagaacaatatgatttttgaaattatttttactttataaaagaaaaaaaaaagccctcacagagaaaaaagaaaaaaatgatgatgtctttgaaaaacaaagttaatacagctttacatatatttgacctacatcagggttaatatttttcaaggtgaaacattagatgctggaacttgcaaaaacaggcaatcctcctttagatgaaacggacactctaagggttaattcattcactgagacctattgtgaagtaagccctacagagactgaaaaagttaaatgcaactcacaaaagttgctagaagagtcatgatgttaaaataaaataagtacacaatgtatgctgcaagtatacttagagccatgctaggtgcggttgagaagttcaatacaggtccaagataatagctgcttctcctatagaacatgtcttctcattggagggataagacctgtgtctatgaaacaggcgtaattacatagctctggaactatatatgccgaaataaatgagacagtaagtgttattgtactataaagaatgaagaaatcatgatgagaagtaacagttaatgaatgttttctagaaagagtaggatctgaattggccttaggttgtaagcagagtttatagatagagtagtggtatgtcagagtcactctgggtgcttaaacatacaaatccccaagtctcacccaaatgtgtcttcagatgaaaggaaaaaacaaatgacttgagctcccccgcaaagaacacgggtggtatattgagcagccaaggagtgaccagagtggcaggcccatgttgagggacaaaagaggacaattagaatatgattaatacaaatttacagtgggatgagttgttagcctgaggagcttgaatgtgaacctctgtgcaaaaaggagtcattaaatacttttgaaaaaggtgggatgggaagaaaatgacattctcaagacaattagatcgaacagtattaagcatgctgacttattaagttatgcaccttgagagggtggaatgagggaaaagggtctttatctggagtaagacaggaagaagctaagctgtaattcttactggactgtaaattatgtgcagatatattatctgtcatgttcgtgggcgcattctcagtacatagcacttgaaacaggtactcgataaattgtcaaatggatgcatggagtgatttccatgcaaaatctaatattgtatagtattagaagggggaaaaaagcatggcattatgctagcagaaatgtcatttggtattgaggatgaaacattttcaacagtttgcaaagccatccactcaaacattctgtcactttccaataattttgaaggatgttctttctacttctaccttattacacaatgagttgagtaagataaagaagtcatgtgcaacaaaacagagggagattttctgaaaggcactacaccaggaagttgttgtactcttgcttcatcttgccatcttggatatacttctggcgctacctccaggccagttcctcgttacatatgtcatttacttcccacatgctagactcaccgagttaatcattttgctgcagttaacacattttagcagagtgtaggtttatgggtgagaaggaaatcaatgatgtttcaatacagggttcttttcccatcccccttatttccacttagaactgtctctcaagtcttaatttgcctctaaacttttttcccagcttacattcttttctgaaaaatgcaacgacgatgccaatgtttgttgacctgaaatacattgtaaaacattcataatactttgagcagagcttccaaactcccatttgcctcttttatctcccttaccttggcccctttttgaaggcaatgtgatatttaatccgtttctattgatgcttcaaaattattgaaaaactggtaattgtatttttccctttacttatcagttgctagttgacaatgagtgtttgcccaaacaataaccaatcaaaaggtaaaaaggagattccagacatatctgagaagaaattctttggaagaagcccgtaaatggaatgggaattcaaacaaagccgtttccaaaagaaatactaaatggtctctaaatgcaaaaggattgctccccaagcattttatgggagcataaaaagctcccaacacattttatgacaatacttctactcaatgacttcttgtgttgacatatttgttgcactcgacgttagtatttacagcttcttatcccaaatatttacttaactgaagccctgatgtttttaaaaacttttcatctgtgtttaacagcccattttacagaaacttatttgtttcatcaggcagatatttactgagaacttgcaagtgccatatattctaaaaatgctgatgataaaactgtgaacacaatagattctcatggtgcttatggtcagggctagcacacacacttgtgaaatgatcactgatgatcaaaggcataaacactacatttggaagaaataccgagggatccagaagtatcttggaaacactagcaagtatagcagatggtgggattggtgcttcaaagaacttcttgtggaagatgttacgtatgtaccttctctgtgccaggcactgctaggaagtgctggagagaaaaagatgtgctagataccgcctctgtcctatgtgcttgtgctttgtggggaggtgagtaggataatcccagttctcatgcagtgtaatgagtaccatgacggaaatgcactccaagaactaggcagcatgaccagagataggacatttgagaaagacttcactcgggtggtactatcttagtctgggtgctaaaatagatgtgatagatgagtaagggtgacccggaagcaggagggaaagggaggggctttcagaacaacaagtgcgaggacattaaggtgaaatagagtataatagtattcccagatccttgggattgttctccattaggctaaaacaaaggtgttttctcttctttaagatttcatgactgcagattgcataacagaaggtcatttaatagacctctaaactgaaggaattcttgaattaaatcacaacatatcttccatggccagagaaaccattgcctccttatgtcgacattactaacagcaccagcacctgctgctcaggccagcgggagggttgggtgttgctgcctaggtaatgctcaccaactgatgtcctgccatgagtagttttgccaagttccacaaaaaaaacttagtgttctatcagcatctaatgagaattacagtcattagttaaataaaagaactattagataaggagcagaatgaacaacacacaatccatcagcttggtgaatggtatcagatggtttctgggtgctgggcagctgtgcatccaagtagacagggagaatatatatgtcctttgccttatgtacttgtttctctaatccaaaggcacagcaatccgtggaagctgctatgataaggtgtttagtggtgaaaatgtcttgaaagccagtagattattaaagtgatgtttttaaaaatgcagatggagagtaagtactttttatctagagtagtagttctcaaagggaggtcccgggatcagcagcgttagcatcacttgggaacttagacctgcatgggccccattccagatctcacttgaaaactctagggggtgtagcccggcagtctttgttgtgaccagctctccagggggttctgacactccaaatgttcaagtttcagaacgctactcacaggccatcatgctcggcatcacctgaaagcttgttagaactagaaagtcttggccccaccccaagcctactaaatcagagtttttgggagtagggccaagaaaactgtgggttaacaaggtctccaagtgattcttattcatgtcaaaatttgaaaagcgtcgatcgaactgttggttctcagctttgattgcgtatctgaatcacctggggagacagttgagctattccgggcccagatcacatctagaccaattgaatcagaatctatggaggcaggacccagacatcagtattttaaaatatttcttgaatgatcccagagtgtagctaaggttgagaaacactgttctaggattaaaggattaatgtgtttgagagtatgttaagatcttaggcaaatcacaagggtgttaagaactaccatcttcgcaaaaggagaatgtgcctcagatattctggtactgctttgattttaccttcagtagtcttacctattttgagtatgcttagtagtactaatatgaggcttattactaatatgttaaaatttgtcttttaattaagtgggtctaaacgttttaatctttaatctctgacccaactagaacttttctaaacattttcataatagtctccaccttgtcttctgaccttcacttatgttctttcagggttcttcgtgtgttactagtaatagtaatggcaagtgtttattgaacacttactatgtgaagattctaactggcttttaataatcacatcagctctgggaggtagaaggtagggatcctccttgcttatcaggtgagaaaactgtactatagagaagttagcaacttttcccaggtcataatatgtgacagctaaagggagcataatggttggaataaaataaatctactctagttgtaccgaaggctcatatttgtctcacgtacttgatttggtcgaggcccaaggggtcaatttccaatgcttggattcctggatatgtagagttgtattaaaaatgctaaaaacctattatgtatcatacaatcatacatatcacctaaagtattatggaaatgaatctgtattattaagggaaaaaggcctgtgtgaagaacaactgaaacttcattttaattgaaattaaataacatgcatcatacactaaaagtgcacgttatgaccccatgaattacttcaggtggctttgattcatgttacatacactaacaaatatagaagagtgatataatgcttcttaattaactactaatggaagtttactatttaactgcttcttatgtaagaatgtaaatgttttctgaaatatcagaacttttcattaggaagcacttttaaaaatagcaaaactgatatgcactatgatttccatatacattaaattgaacttgtaaatgatgttataaattatagaaaccaaggggatgttcaaattagatatttgtctaaataaatcatgtatggattgaacaaatactcattgagaaataaatgtattccttttctttcaattatctaggattccttgtttatctcttcagaagcaaaatgtcttctgtccgttttatttccagttaaacattcttcagattatgtaaataagttaacttccaatcctcttatttctgtttatctcaccactcttctaatttagacgtgatcaatatcttatctttttgcatttcatagacatcaggatccagaataattgagtgagctcaaaacaacaatggcaagaatgatgttttcagaaaactcagcaatcattcgtttaataaatattcattgcctaccaactataagcaaagtattggctaggccatgtggggtatacaaaaatgtattaaatatggctcattctccctaagaacttacacctattagacaaagtacatgcataaaaattataatgtataatagaaaataaatacaagccctagaatgcacagttgaagtacgatttgcatttattataaaaagaaagatgaattggctgggcacggtggctcacgcctgtaatcccagcactttgggaggccaaggtgggcagatcacgaggtcaggagttcgagaccatcctggccaacatggtgaaactctatctctactaaatatacaaaaattagccgggtttggtggtatgcacctgtaatcccagctacttagcaggctgaggcaggagaattgtttgaacctgggaggtggaggttgcagtgagccaagatctggccattgcactccagcctgggcaacagcaagattccatctcaaaaaaaaaaaaaggaaagaaaagaaaagattaatttcctgttagctaaatcaaggaaggcttcatggagaaaaaaatatttcaacacacacttgacgtagcagtgggatcaggctgatgttagggaagaatgaatgacattctacactgagaaagagatattcagtatatatatgaagagcagtagagaaactaacaagtggaaatagactcaatttacaatacttgcctgcctggagtactctatacgttgactgtaagttgcagtttactcagaacaatcccactttctacttgtttatcctatgtaatcatttattgggcctccttttgctctcaaaaatatccttgtttggataatagattatcactctgttcctaaatgaactgccctgtgtcctatcccagtaaaagggtgcattcgggcccttcgtaactgcctccactacatggttgattgaaaccagagcttggcattaagaagttagctgaacaatcagatttctattcttggaaaacccaagaatttcagaatagatacagaagctgtatagctttaataacatgacagagttgtagccttgaaagctatgtacaattcagaattatgagggagaagaaattgaagaaacagtagcagccgggtaaatgcagaaacaaatgagggagacacctagggggtgactgaggcacaataatggaagagaagtgcagtgaaattgcttgaactcttactgatgagatttctactgttgccttgaatccaggaccacctatatgttcattctttgtcatgctcagagttatgacagatgctgttattgaattccccagagactcccttatcgtctcacctcaaaccttacaataatcccttctatctttctatccatccaagctggcttaagtaaagtctatgatccatattcctagtaaacagagaagggaaagagactgaaggcaaaggccccaattagtaggctattgcaatatttcagggaaaaggcaatggccatcacattgttgtcccaggaatgagaatagaaatgaaagaagataatgaaagttgaaaggactgggggggcttgacaactgtttagacttgaggagtcagataaaataggaagccaaagataattcagaatattttgattttgattttcatcaccaaataagatagtagtactatgaagaaaaaatggttaaaaaacaataataataaagagaactcctccaaatagtaccaagggagggagtttaatagaggaaattaattccgtaggtgatgagagtcctgagaagccaaacgagaaaagatcaaaacaacccagggattggcagtcgcaggaagctgttctcacttatggctggggctttaagcacaaggtgacatgagatttcagaatttgaagtcgtctggaggcagctaggatcaggtggggcctgtcctgttcggcaggacctgcaaccacaggaggaggatgcgtcaagcagaaagttggaacacaagaggggattcagccataagccacaaaataccttccagagcagagagaaggagaaataccctgaattccgtattttccctgccatttagttccctgctattgccacacattgacgtattccatccagagaagtccattggcatatgagtctgggaaatgtagttcccagggggacatgatcttaagggaaatagacaatgactggtgcaacaactgacctgtgtgaggcaggagggaaaaaacaggaataatatagtttttctctagatcccttcatgcacaaagatgcaaaagaaatgtgttggcttaatgagccattctgggtggccctgtaggtggctgtcctacgaataagatttttagacaaaacagagatgacttcaaatgtcacaagaaaagtatcagacaggaattaatattgacttgatctgtcacaggcgtcaatgatttgcattaagccaacgatcttcattgttaatgtctgggaaattgccagcagcattacgactacttgtgtggattagtgtaacggattcccccactaacattcaggaaatcatgtcaagcacagagtgcctatgtaagagtggttgtgtctattcactacatttcttggactaataacacacttagccttcctgaattgccaacatgtacaaaaccagattggggttttttagttgttcatggaactatcatttattgggtagctcctgtagaagcaagatacagaaactctaattaggaataagacagtccctgtacttcaaagagctctcaggggaggcacacaagtaaacaagcaattattatcatacgttaggataataccgtcatggtgataaccactgagtgatagccaaacacatggaagaggtacccaagtctaacttggggtagtcagagactgctttcaaggatatccgagtaagtgttagctaagacatgatacgtatttctaggagggaaattttcaaggcaaggtggagattgtgcagtgacgcccagagcctggattattttggtgactgctagtatttcagaatgacttcagcaaaagttgtagagaagatagaagacaacaaagtataagcagaggccagataatgaggacctggaacagtggtttgctggtaaatgtttaacaagaggctcttggcggggagagagagtgtctgatttgcagcatttggcaaattttgttgcacaaatgctccagcatagccaatttcaagctaccagtgtgacgtcattgaatgcagaattggaaagaaacgggcagtagcacagcattgtatagttattttcattacccagatataatagataaaatatccagatggtatttaatagatatggatgcaaaatttaaatatatgtacattcatgtgcttcatgttactgaatgcgcacaacattcattatccattcattcacgtgttaatttaacaaacatttctgagcctctgctctgtgccaaacgcagttctagctgctggaattacagcactgaaaaaaaaaatttgtcctcactgaggtaagacaaacattattatgcccattttacagctgagaaattaagacatatgaggattaagcagtatagttaaaatcacacaattggtacatgaaggaatcaaagaggaaatcagctctcagattttaaatccagggactcgtttctgctataccatactacctacctagttgagctggattttatcatggtttccctatttttatcaccatgtggttggataagtaaaataaatatatgtgacctttcaaataaatttgggtcatttttcttggaagctcatctggtgtgaactttaaaatactgcaattaataatgattataataccctggaactctgtagcaacctcttttgaagaactccaaggagcctctaaatgtatcaaactaagttcttcaagtgaattagttatcatctgagagtaatatagacttttaaaaatgcattaattgtattaaccctttcaggcccatagacttaagtgtttctttctccaaataaaaatagtaatctctgtccattttctttagagaataatgaagtaattttcattgaatatgtagtcaacataattacttcaattcaatcgtgaaggattttaaaaattatttatgtctactaacttaaagacatgcatagatttcaagaacttaaaaatgcatattgcctctttgccctatgcctcataaaacaaaattatgataacgttgtgtgttacagaaaaacgcactgattgtaatgaagggtgcttcaaaggccatgaacttggaaagcaacttatttacagagacccccagcaatagcagctaaaagattgactgactccctttattttcagttatccttcagacacttttgacctcttcctgtgcctttctagtcatgtgcaatcttgtggatatctcttccttcctcttgttattttctatttcctctgtttctatttgtttctaaaaataatcatgtttgaatataggattagcttccttcccatctccccattaccaatctctcactataccgctatgttattaatcttcctgagaaatatatcaggttcattacattagttaccagctcaaaacgtatcagtggctttctagtcctcacaggctcaagttaatctgcatattctgactttcatattctgggttcatgcaaacttttcaactttccctcttatacctacttaggaggaccctcaggttccatcatgctcatgtttcaagccagaagttctcctgcctcttcctctatgtagactccacatagactatgatatcctgcttctcttttaatcctccatcttcagctcacagccacactcctctgtgaacagttaaatgattctcccacctcttacctcctatagcacttatttttcatgcagcatttttgagacttaattaaatctacagttttaaaaaatgtttttctaccacagtctcttattcatactaaaactttcaagtctatccattttgcttatacaaccacaccgttaggtcttttaggtccaagaatacaagagaatggcaaagcacgttgtttacatccacacatactgtgtaaattcaggtaattttttttaatcctatgatcctcaattacctcacctgtaaaataggtactactcatactgcagaactcttgttggaattaaataaatgagtgtattaaaaatgctcaacaagatttggcacaaaatcggtactcagtaaatgctaatcattattccctttctcttcaaagctccacaattctgtattcatatcaccctctttatatcatttgcaaaaatgtatcctattccaactctttccacctagcctcaacatttacaaacactcctggtgggaagggaaagcttttgaggagagcacatctatactcatttacttctcagggatgcaagctgccctgcttactgagggcatatgttcatagtcacaccggagcccactgtccccttatactctcaaatgggcagtagcaaatcatcttgatcggtagtaatgacctgtctctaaattttcacatgcatcagataatttcttttttagtaagtgttatcttacatatatgccaaaatatcaccattatatggaacactagctgaaagaaaaattattcagtagtcttaattttctagctaacataaattctctccattttcatcatccatttagattaaagactttactgttagctgaatattcagagactttattctgatttttaaaatttatgaggttcataatgttaagacttcaagggtgagctgtttgtgtcatttataatgcgtgactagacagtaactagaaaatggattgttgactttacaagatttctccccaccacgtccccccaaacctgtgctgctgtgtatttggcctgaaatctttacttctagtcaatctttggacctaaagcctaccagcttttagcatcctttaagattgacgtgtctctgggagaccaatagatgctaaaccaaatttcgtatgcacttggcaatataggataataacaaccatactccctgcaattgtttcctaacacagatgtaacaaattaccacaagctgggtggcttaatagacatttattctctcacaaatctggaagctaggtgtccaaaatcaaggtcaattatccctctgaaggctctggggaagaattcttccttgcctcttccagcttctggtagccccaggtgttccttgatttcaagcagcacaagttcaacatctgctcctgacctcacataaccctcttctttgtgtgtctttctgtgtccactcttttctttattattattattattattattattattattattatactttaagttttagggtacatgtgcacaatgtgcaggttagttacatatgtatgcatgtgccatgctggtgtgctgcacccattagctcatcatttagcattaggtatatctcctaatgctatccctccccccctccccccaccccacaacagtccccagagtgtgatgttcccattcctgtgtccatgtgttctcattgttcaattcccacctgtgagtgagagtatgcagtgtttggttttttgttcttgcgatagtttactgagaatgatgatttccaatttcatccatgtctctacaaagaacatgaactcatcatttttttatggctgcatagtattccatggtgtatatgtgccacattttcttaatccagtctatcattgttggacatttgggttggttccaagtctttgctattgtgaatagtgccgcaaaaggacaccagtctttggatttagagcccaccctaaattcatggtgatgtcattttgaaattcttaactaattacatcttcaaagaccctatttccaaatctggtgacattcaaggtttcagggacatgtgactattcaggggaaactattcatcccaccacatcccccttgaaaattctggaaaatgtagtaataaaggcttctgataaattagtgtggaaagtattcacggttataaattactaaaaagtctcactgtgagctcttaatcaaaaggccctataaaacatttatttgcttgattaaaactacacatccgatattttggttttggatttattattatttttagacttggaataactattttatgtgaaatagattccataactgaagcagcatacctctcaatttcccaacatttattttattattttttgtcttcacactacttaataactgaggaaaaatcatttagaccaaagttcaccttggttgacaccatccagacagctacaggaaataacaatggaaactaaatctctaagaaaaagagtctttcatgtgaaatattgcagagttgattctagatatatagctgttggaagaatggatactattacatagatatggcagagtggtatccagcacctttcaacaaagatctttcagagtcagtcttattatgtctggagaatttacccagggcttaggtgcttttactgacaatctaaccacctgcaccccacccaccgtctaaagctaaagtttattggaagacttaggaaatcagtcttcggaatgtttctgagactggtacacccaccacttcattaaagtgcttcacttcacttcattagacaagaagtaaaatacttgtcaggaaattatttatagtaccatgtatatgggtatcttatttaatactacttaatgatggtactacaagttatataaaatggagaaataagtcatcaagtttgacaataatgatatttgatattatcattatcttttttattcgttcccacagaagtactctgttattggtttagaaaaatgatatttgatataataaagaaggaaaaggtggtaatattctttattttttgtatctttataccccagctctttcaccaatctcccccatctctgtagttctcctctggtgtccccaggcagtgaactattcccagtggttagggaacatctcattgagtaagttacatcaacatttcttcacatttcaggacaacaggaacagtgccaaatcctagcccattgttcaactctcaagccttattatcctaataacacatccatcccaagaaagaattcatcaagatcagagaggaatacgtataattttttatagtacagtatttaaaatgaaacagcttttggcccgcgtggtctcagtgggctcaagggggaaattcaggatgctagctcatctcacaccaagtttaataaagggtgtcctataaaaagctaatttcttgctggtaaattgctttttaagtaatccttgctgttgcaagagacccattcatagcgctgacactgggagccatgttggaaaggctagatatgctctgggagataaggtaagatccaggtggaatcttctctttacagaatgacaatgtatatagctaatattgtcctttgaggctagtttgcatgcagttgctggtatggcactgctcagcagcctgctgcagataagaatgagtgatgatgccctagattttaatggaacttttagagtgcatgcagcagtggggtgcagtcttcagcaaagaaaaacgagctgacttgcaggcatgagagatcatcaagaaagataaagaaataggacatccactctaggttaggcaaggctttttagaggatattatggaaatgagcaagaaccaatttaatttttataatgccactccatttaactttaaaatacaaggtcaaggtactgtgtttttcataatgattaaagatttggagcactctttctgttgaaacatactgcatctgtttggcagaaaaaaaaagtgacaaagaataaaactgggatcagagaacaacaaaaacatattctgtcacttgcctaacacaagttaaaaagcaaaggaaaaagagacaactctgatggacatgttcatccttatcccaacagaaggatttatttacctaaggtcctattatttcaagttactttgatcccaggatggtaacataaaatgtacattttaaaataaaatggaagtataagatcaataaaaaccacatatctgtggataaaacagcagattcaatcttgtggctgaaagtttgctttaacccaacatttggtaaactattcactctgtaatttattaaaagacatactgttattataaaactatctcagtttgcatcttgttggttctgtcaaaatttcatcctgctaattctcaacttgtaatatctctgatatacatgattaatctattttaggaataaaacaaaaactacctttatcttacgcatttctaggaagtgtttttagatgtaaagtaggggtaattgtagtatagtggaaaggattttgaacttgaagccagaacatatgtctctgccaaaaactaggtgtgtgaccttaaataagttacttagcttcctgaatcttagtttgtttagcttttttctataaagtggcacacctatccacatcacagttttgttgtcaaaattaaataaaatactatattagaaagaaacttttagaaagaaatttataaactgaaatgtactatacaagtttaaatcattctcattattttcttaccctaaaattttgaccttatttttcttagcaaatggctgaatctgtaaaatttaacccccacgcagcatctggattcaagagaactacggtcatttctttatacagaatactaattatacacatatagcaaaacacaagttttttccaactactctgtgtttttaaagattcagtgtgggcagaaggaattttatcaactatgttaggggaaaaaagtctgaagaaatgaaaataatgagaaaaagcactgttgatttaagtgcaggaacataaaacttcaaggcaaatgtgaggccaactgagttcatatatatcctcacaaaatgatttagttaatttaaaaacttttctaataagcaacacaggtaatcccaaattctatcttttatagctctaagagtccccataatttattcagcaattatttaccacccacttattataagaaaagccctgggataagtcttgagaagaaactaacaaaaacaaaacttgattgtttgctctcaaaaagctgggtctaaaataggcaaggtaagattttgttttgaggagcccgtattttccagcactgtccattgtaacattaaaatagtttgccaaaatcctcactctgtgggtgtatttgcctagggtgctaaaattgcttaaaaactttgttatttggctaactaaaatcactgaatagtaaacagtagcattagagatggcagagacattaggtgtcatgcagttcaactgcttcacctagcagacaaagacattaagttccatttcttaaatttaactatctggttgaggatacacagtagcagagctaaatcaagaacctcttggggttagagtttttgtttatgcattactttgttttggaattaaaaacagtgcctgtttgctaagttaaattgaaaatatgctctgaaggagaaaaacagctataaaaatagacttaacttccaaactatggatcacaataaactaaagaaataatttctgtagcaataaactccaacactttccataggaccagaaaggcttgagaaagaggagaacaaaaaaatgctttggggcttaccatatatatggagaaagctaaatgaataaaccagttgaaagacagcgagttatactagtaacaatattactgatatcggagctctcacttataaattgtatattatgatcatagtgactaggtactttatatctgctttctcattccttcctcacattaattcacatgtaggacagattacctcttctgtttctatccagaggcctagagctcaggccctcatcgaagacagacagagctatcatccttattctaaaaaaaaactaagaccccagacatagctgtgctacttatagactagaatgtgagagaaaaagacaagctttcatcatgggcttaacaaactgaaacacttcttcaattttgagattgagaaacttagctaatgctaggtgtaaagatgatatgctaccttcataaccttggtgaggagaaattagcatttctctcagtcctagaaggaggatgaccatgaaggtcttcattctcttgagaagataatcaaatgcttcactgccctgttaacggtttactcaatattcaccaagaaaagtagatgggattatttttgcagacacttatacgggtaatttattctgataagcagagacatacctttagtgcataaattgttccctttgtgctctttgtaataaacatcaccatagagaacaaacacgaagtaatgacattgaattaaaagacaccatagaggcaacagcgactggaatttgtgaaagtaaaaggatagtgcaaacagttgtgcgttgcattctgctctgaagattaacaagctgggtcaggctttgaccatcatgatgagcaggagatttttctaatggaaatccccaatcaagttcctgctgcacccagaaaggaacggcttacagaaatcttacatttctttgcacataccaaattgcttggcatattctatcacaaggtttactttccagggaatgtgatcaagaaatcatgatcctaattcctagttaaccctcaaagtttctcagaacagtcagtgcatcactgtcaacttttgtgcaatgtggaaatcagaattggtcacacgtttttccggccactgttttagattcatataatattagtgaaatcatgtcagactggtatagccatgaatttatacttcatgaataggcactcaataaatagtggattaaatcgaccgatttgatttttacctccaataatttcaaaaatatcattgaagacaaggttgttgaagctgtcacttttcttgctgaacctttgttgtgccaggaggaacagatggtaaaatcaaaagtgattagagaatcagtggggtgggggtgagattggaggggagaggtcttcccagtgagacccgctagcgtcttccctgagcagtatgttaacccaagacaattttagaaatctgtgcccctaagttgcttgacatccaaagcacacttgatgcatcctacatttctaaatatttttattgttgtttctcggtagtaatcatctggtttagtcactctaaaagtcaaggatgaaattttaaaatgcaaataaaagtgcctactttctctctttccaattcctttttgttttattgaggtataatttacatgcacaaaaaaatcgcctttttaaagtgtacagtttgatgagttttgacaaacatatgcagtcctacaaccacgtccgtgatcagaataggaaatatttttatcacttcaaaaagtttccttgtactcccgttgcagtcagtctcctgccccaccccagcccctggaaaccactgataggtaaaagcacttttaatctgaaaggtatttaatgtatggcagtgtcagtggtaataataacaagatttattcattggttcactgtatttttgagcacttatatgtgcccgttgtatgcaacccattatgctcaacccctgccctcctcaccagggataaactagtggcagagatagacaaagaagccgtctctctatcacccctatcttatagaacattcttcaatgttagaaatgcagtataatgtggccattgagaacttgaaatgtgcttagtgggaatgaagaactgaagttttaactttatttaatttcaattaatttaaatttatatagccacatgtggctaatgactatcccactggaaagtacagcttctatacaatatgataatatgatacattataacgcaggagtttaaccaagtgctaaagctttactatcaccagggtcactggtgttatgtgaaaagaaaacttacaatagaaaaataaatcctttaaatagtcacagacctgagaaagtttccttctcaagggaacacacattggctcattcaaaggaggttaaaaactagcatttaaggtaatttcatgaagctttcctttggatttctcatgcttattgtatacataaataggcaattttcgatgggacctaataaatcactgttttttatttgaacattttaacaaaattatcaaacagcattgcatttatgttcaacctatttgttctgagaaagacaacgattaagtagaagtcatcaaagttaccagaacaatttttgttcttatgttttagaaggcattgaaggtgtttaaaatgtacacttatagagtcagagtactatgcaactgtggcccttatagtttatccgtcatgcatctaaagccattgttacatctgtttctaattgtgcatggattgtccaagatacacaattggaaattccattttatttatcaatttgaagaggtttcacccatgtggtcactatgatcactatggagtcacattaaattgagaagtctccagaagttgcagtatttatttaaaattctaactttcttcagaggaacaaattctccatttctggattctgaatcctcattagccataaggttgttgtaagaatttgcagctaataggaacacatcctggggagagaccagttgaaaagtaacttggttctgagtgaaattatacagagacagtttctacttcaggtggtgttgctaatgaagctatcatggtaattttagcccatatgatccctaaacgacttcagaaccacttttcatccactaagaacccacttcaaccactgccacgttcactaccacagtataatatggaacaccctctggaattcagtaagtaacttcttaactcattggctatagagctttgcctttgtaaattctttccttttgcagtaaaagagattgtttcaaagtaatccaattagtccctaggcatgtctagaaaggtagagtcaacaacagtaaggtaatagtccttataagatatgtaagaaattatcagtcatttactttaaaataatttgtacacttttccttttatatggttcttctatgttgaagccagtggtcatccagtgattaagattagccaaactcaaaaggctaaaactaaattcaaatggtattattttgctttaattttatgcaatgctatgtatttaaatttcatgaaagtttcgtatggcattgctatcaatttcagtcaggataaatttcccgtgaaataatccacaattttcaactgtacgttgggtacaggtaaggaaacacccttaagagcttatccagttattagctggtattataaatttcaagtaattcaatgttcaattaataaacagttactttaaatgggaaagtatgagtcaagagttagtacaaaggagaatcttaaaagatgaacatcaaagaatcttactattgatttgttggtgcctttgcttgcacttctccaaattgacttgacgttttaaatttgtactgataatcatcagagtcaaatctgcttttaggcaaaaagtatccgctagttattcccctactatgaaagtgatgagatgaattgatcatgtctccagtgtatggatggatgtctttgaggaagacctactgaccttatgtttatcttctgtcagcatggtgtgactatgtggagagacagtgctatttgctaaatactttgtttttcaaataaaaagatttcacagattatgcattgtagaatttataagtattcttttatgtctttgaatgtgccaatacaatttttatgaagttggaactattttatctattttaatgaaattgtaagccttctgtgaattcttttattaattttattctgaagaaaatctgaccaggttagggaaatcaggtcaggttacgacgtgatcccagtggaaaagctgaactgtggactgtgatttaaaatagggaagaggtactgaagtgttgtttttatttttgtttacaaatcagcctttctaactattatgtactcccatccttctatctttttctccaccagaacgtattaacaggcatgcatataattaatgcttttcttgagataatattaaaattaacttcatctgtcaggccgtctgggctaaaagtacacagtcagatctgggtaacatttgagttgatgtaaatatgcccacacatactgacaatgcttaccatttattgtgtgaatgaaaagcagtgtaaatattgtttgttctactagggaagctccacattttaatcaaactttgaccgtatttctaaaatgccagagcatctggaattgttaaaggaactgatagtttttgtgtttttaactgttaggatacttgaaatccaaagggtaaagaaactcagctgatttatacgtttcttcctctttattttaatgtgataaaatgtagtttttgtcatgggctgacaaacagtggtagactacactaactctgcgtttgctgggtttaatcttaccctctcaaggcatggaatgggagctcacttcagacccagccatgcttcactgtccactgccttctcatggatatagtgtgaacattaattagatgaattccataaagtgctttaagctctttggagaaagatactcgctgcataattattcttaactcccatacgctcttatgatataaaccattctgccaggaaatcctttttagggattatcacttaaaatgaaattttcattattaaaagcaggaagaatatacatctactgacagacgaaaatgtgcttaaggcgactgcttttaaataggcagaaatcctgaactatggagccatccatgcctgaaaatactgagtaataatgaaaactggtagcaaatttggaatattaatcatcacattaagttgcaaagaaaaaaaaatacaagccacatgccctttaaaaatacgtgcacaaatctttattctagaaatatataactttaggcctaaaaaagtacaaaaagtaaattattttatggctctgaaagtatccttaatttactcaggtgacaacaattagtgtttaaagagttagttttcaatcttagctacaagttggaattactctggaagctctaaaaaaacaaaaaacaaaaaaaaatagagatgcctagttcccacctgcagaaattctgatttgatttttctggtgcgagacctgagaataggaatttttttaaagcttccctagtgattctagtgtgccacctaggttgccttaaggtaaacctcatattatgcagaacctagcaatcacctatcctgattttatagacgaagatcataagacccaagagggcaaattgatttattcaagattgaatatacaaatgatagaagattcacataagatgcagtatacagagtggcttgtggattcttgccaatgcaggcagcagaattttctttagggttcacccagttcaggcacctctttgcagcagcacttgactaaggttcttctgattggatcattatatgggcaaaaagaaaaagcttaattgaaaagagctgaacccacattgtggaatggaagatatacagtttacacgttataaatgattaatattcatgaaagcatactgccctttcctcttcccttcccatagatgacatcattgcattggtgtagttaggttggtggtttcttgttgttgatcttggttctgacacagttcatcacttattatcctggcttattatctacttctacattcattgttcactcactcactaattaattcaacatggtttttattgttttggaccggttatatgcctgcaacgctacgtaaggctgaggatattacaatgaacaggaaacaaccctgaagtttaaggtatcaagcctttgagttactgtcttttatcatagctgatataaaattgaagccccactttttttgttttcaattactgaaaattcagtgctaaaaaaatgtggatttttattcaactagataaagtactacaattaggtttccactgaccttggctgtttttgttcccagttgccattacataaatctgtgccactcacaacttaggaagggtgtaacattctctgtaatagtttgcctttcgaatagtgtttggattcattactgtccctcgcagtttggaataatgaccactgaataatcagtgtttggagactaaattagtgctgcaaaattccctcaaattacctactgttcttttccctgtcgatgtatcctcatattcactatgattaccctgagaagaaagatattgttgagaaccactttacctactcgaagttttggtatttcaaagattcatacttatgtcatgttgattacattagcactaatactattggcagaattctaattcacgttattttctttttttccaatttctctccatgcctatgtgttgtcccttcgcagctataaagccatggccgattcatgggtgcttttgttaaggcgttcagcagtcacgtttgtagatttttgaatgggacttagagcccttttttgttctttatgtatttctctatttctcagcaaaggaaatgcagacatgcaagaaatagtgatcaaatgtcctgtgtactattgtgggtgtcattaatggtatagggagaaatagaaaatagttgcaaagatgcatttaacaaataaacgaggtcttgagattcaccatgaatgtggccccttctatgaaaagtagttaacatccaactgcaaagttgtactggatcagtttgactttaacctttagctaatatgaaaatatggaattgtgtggtggtgctcacaaaaaagaaaactcatttttcttaattatcatcaattaacatgtactgactacccatgagggaaagttaatttgctcttgagtggaaccagttatttgccctattatttctcccttgcttattcccctctccctccctcctccctttccattcaacaaagaaaaatagataaagcaatttctgattagccagtgaaagcctctaacataaaatttccaaagatgtgccataaattatccacaaaatgtaaaacttttcaattttggtttgcattttcttttttcttattataaaggtaataagtgctcattatagaatttgaaaaatataggaagttgcacggaagacgaataaaatcagccataatcctacaaacctattgacacttgtacatatgtttgttatctctaatgcattcattatgataatgcatcttttcaaccaatagagtaatcactggtgactttcaaatttgcctactcatttttcactctgtggacttactttactacctcttgccctttttcagtaaatgaataaatatttaagtaagtaaatacaaatgtaataacttatgcgctcaagcacacagatacacacagagagaatttggaacttcggaaatgccatcctctccctagggccgcaagtgagttgataagcacgtaaggaaggataatcaggggagccttctcgtattgcccagatggctcaaaattcgtcatctctaccaaacaactatttggagctttgaagaaatatccatgacccctttgaattcttcagtttctttcgcgttcactttgagaaccaagtgacaagtgaatttcctgacttggtcttttaaacctgttagcgcagttccattgagattttgtgggcacaagattgcaatgaagagatcaacagggagaaattcatttccctatatatgtgcgattaatccggagtgctaagggcagatataaagcaggtgcctactcctgtataacttggaataaaaccatttccaaaggctgatgatcctcaagtcttgttctgcaaatgactgatgtataacttcaggccaatttttctccagttagtctgtgtcactgggagtcccatttctcggggagcagccccatgctttgtcaggtgcggagcccacagaaggttaatgcgaaaagaaggcctcttgccagactgttttccagatgatacgtagggttattagtttgagctccttaagaagatttttctcacctgtcctaccaacttatgtttatttcattggtgttagagggtttcagtggcggaagtaaaatatttagcggggaagggacagcgttcatgggaattttgcctaacttaattttgtatctttagctcattcgtagtcattgtactttgtgttttgtcaactgaattttgtttgcatacaaaggcacaaaatgtttgcttcagacctgtcactcttatttttagcatggttagacaaaaactgagatgctttaattgtctaacttatcccagtttaagtgctgcaaaatctcccaggcaatgtcatgggcaactaagggataaaatcagagatttaaaggtgccaggtttcccacgcttctaacagttggcgttttgggtgtatacaatccctcagctttcttctttagtttatggagtcttgtggagggaatagcaggtttttagctaaaattatcatgctgtcgagttgggtctctagtgcatcctgaagagcttgcattatttacagaggctgggctatcattttaaatcctgatgcttcaatgcccgttatcattcttgacaaactcttccagcccgtggtctgttttcctctgtttgcttccatttactttcctgagcaaccagctgagcaaagatttacataacttttgtttaaacaaaccctgtacagttcactctttcagccagtatgtaaacacttttgagacacagttacatttttctattttagtcccagattctgtttatttgctacattttttgtgcccacatttttgtctttgttaagtctcttacagattcacatgaaaaaccagaaaccgtggctgctcaaaagtcattaataatgagatttttagctactgtttctgcttgtaaattcttcatttcacataatacagtctcaaaaggccacagagaattcagcctcgcttatctctgtgttgcagatgatggcttctagccttacccaatcccagtgcagcttgcttgccatccaggagtcgaatttgtttccatctgacattagcgtattaaaaagattggagatcaacaagcaacaatgttcttgtagaaaggtaatcaaggtttagagcctgtgtgtcatgagactcctagcatttgaaaccgctaaggggttgaccaccattgtcccaagcacctgtttaagattctttcctatgataagggacctaaagtgattagcatactgataagattttcctagaataacctatttatttcagtattattctttcaaatcttaattaccatcttttcctttacccagggtcttctttctacctctacgacacatttaattacctatattccccaacctgtaccatattaaattttgaatggaagttttatagggtaatttattggaaggatggccttgagtgtcattatgttcaatgaatgccctattttgacaaagagatgactaaatgttattgaaatctttttaatccaccacgcttctgcttagatgtaaatgcaaatctgttctttacatttgtgattgaattgaacttgaaaagtaccgccatattgattccttctgcaaataaaatataattacatttccctaaactttctacactctcccaagagattggctggctttgtattgtagatttttggtgatcacagaggacaatgcattatcataagaccaataagatttatttttaccttggtaaagaattttaatttatttctagtttcattttcatttatatccatctcttctcaccctctgctctacaaaagtatatatgactatataaattgaaaaaaatatcaagtgcaaaattacagaaataaataattaggttattttagtggaggaaggtttgttgtgggtggaggaggagaggagtgagccaagaaaaacgagggaccatacgtgatcatatttttgcagctattttaaattgtttgtgtatatactttaaaatattataaaataaaattttaagtgcaatgcatatttggagccaatgatgagggataacttcagaaacgtagcatcatcatctagtgctttcatagtcctttcaacatttccagatagttttaatggcctgctcatggaggcaatgccctaattttaacatatctcttcacaactctgatttcttgcttcctaacattaaatgtcttcaaagcttctttcaccactaattccttatcaagaggataagccagtttattctttaagaaaaactagctacacaaaaccgtaagtcattccaacataaatccttcactatcctctctctatagatttggttttgattcctcctgctgaaattcaaccttctttcttcagctatccacacgtcttaccctctaacttccctcaggagtgtctattagctcccattacagtgaccacagtaatatagtaatcccctgctgttctcactctccacttccttacactgcgttttaagtctcttcatattctttatcaccttgtatcatgcatcggttttcttagttgtttattttatgttgccttcataaattccatgagagctcactgccgtatctttagaacatggaacagtgcttggaacataatgggcattccttaaatagctgtagaataaactttcaaaatcaacaataatgtatttgccaaatccattggcttctctgccattttatcttgttcaataccactgcgatattccccttcctttttttttttttttaaagtctgtaaccctttagcttctgtaatattcctagttttttattcctctcatgtgtcaaaatcatcagttgaggcttattgttttctctttctcactctgacctcacctttgtttacatctcatcttctggctttggctatcctgttttttatctctgttccaacctgtatttctagccctactacctggacatgacatgtggatatctccgtatgaccgcagtttccatatgactttgcaaattcatccctgctctcccctccaaagtcatccccacaattgacttcctgttccttccaacctattaaggttcaaacccacttttgctcctcctttgcaggctacacttttccttctcagtacctcttttttttccaagttcttagataaaagtcatagtaccttacgttgtaattgccactggtctggtctttctgcctgctttcctttccatttgtaatcacattatccattccaatccatttataatactgtgatcagccataaaaataacatttatcatatcgtttgtctccttaaaacctgtagtagatcccctctatttacaagatctggtataaaatcacccttcctgatattcaatgcctgttttaatataatctcaatattatgcgtcataaatccccctgtgttcttgcactttttatttcttatacatctcatcaaccatgtcttatcaactctcaaaacctgtattggttttcaggaaaactcataaattattcttttgtagaccttttgtttgtcatctttgaagatctctctctgaactacaatattttgtctgtataatcaatttggaaattcatcaggtattgaaatatgacatgtcttctattgtcttgaacattaattaaaactttatttgactttttatatgcttacatcttgtttcctcacggagtgttaacctactagaaagtaatagtttaatcttatatttattttaattcagatttagtagcatactttacacgtggtaggatgtgtaactgccttacaccttgcttacgtgagttattaatgttttcgtatatttaatctgaggatgtactagcaatgttaaaactgtaccgcatgaaattgagtaattgaactatttgttttaaatgtgttgcttaacttattgtaccattttctcataatcacagctcaagttaactttgtggttgtacgtattatttcttgtgaaatgccaacaaacttagagcaaggaaaataacaggtataatcatactataaaggcaaccttaacactagcatagtctcttagctcatatggtaactacaataatgtacagtgacaaagagaatattgtactttcttagcacacactttcctactactctactgttgtggataaaaacagacatactttaggagaaactatgttatttccaaataatgccttaaaggttactccaggaaaaggcatttacataaactatctaggaaaagaaccttttaaataatataaagagctcacccaaaaggactgaagtgtttagttgaaaaaaagtaaaaatgtcgaagactttgaaaaatagtttcttgcagtatattttcatcgcttccacttacgttatgaagacattaagcgctagtttatcaaaaactatttttgtacatgtcttctaatgacagaacaatgtcaacatgattttcatcattgagaatgcgtaaagaaaccctttgtacagttttttctatgaatgttcccctaagattaaagcaaatttccaacacgaattaggcactccgaaaggaggaggggagggaggggagcaagtgctgcaaaacttcctgttgggtactatgttcactatctgggtgatggaatcaacagaagcccaaacctcagcatcacgcagtatacccttgtaacaaaccaacacatgtacccctgagtctacattaaaaatagagattaaaaaaaggaaatcagtatataatctaataaatacctctcaagctttctcatttttaaaataaaattttagattattattttaggaataaaataggctcttcattgtatataagttcatttctgagttgcaaaaatcctctctttatgtttttttccccgtattagcatgtttttctcctgtttttccccactcaacttggctgccacaatcagaaagcacaaagacaattttttcttgcgcttgtaaatcaaaaccttagcatcagacaaaataactgctccaggtctgtcaaatagattcatttgagctttcttcatgcattgaatacggcagaatttctgacctgaagaaatctagccttttccaaatttgctttaagaacattttgcaataaatttaatataataaaaggaaaaaacacatcaggctagaatttggaaccgattgttattaaaaatctcaagtctatcaatttaacttcaacaaattacttaatttctgtgatggttaatttcatgtgtcaacttggctgggccgcagggtaccgagacatttggtcaaacattattctgggtgtgtttatgaggctgtttctggagagattcacatttgaatcagtagagggagcaaagccgattgttctcccttgtgtgggtgggtctgatccaatcaattgaggacctaagtccaatcgattgaagacctaatcaaaaagcctgattaaaaggaactcctgcctgatagctaaagctggaacacccatcttttcctgcctttgagcttgaattgaaaccttgggtcttcttgagtcttaagcctccagttctggggctggaacttaacgtcattggctttcttggttctcatgcctttggactcagacaggaactacatcattggctttcctgggtctccagcttgctgactgtaaatcttgggacttctccagattcgtaatgagccaatttattacaataagtctctccctctctggtttcgagagagagagagagagagacagagagagaaatgagagcacaagaacgtgagtgtgagagtgccctaatataatttctctaaatatcactggttactcttcaaagttataaaattggtataaaaggtgacctcaatttttcatggagttaatgtatgaaagtcacaattaaaaaggaagaattagttctggtgtcctgaaagttatttgaataaattaatatgctatggaggctttaaaatactatgaaaatttaatattgtattattcttagtgttgctatttttaaatagcactttttcttttcctttttttttttttttttttttttttttgagatggagtctcactctgttgcccaggctggagtgcagtggcatgatctcggctcactgcaagctccactgcccgggttcacgccattctcctgcctcagcctcccaagtagctgggactacaggcggccgccaccacgtccgggtaattttttgtatttttttagtagagacggagtttcaccgtgttagccaggttgttctcgatctcctgacctcatgatccacccaccttggcctcccaaagtgctgggattacaggcatgagccaccatgcccggcttaaatagcactttttcttgtgagtcactttttaaatatttgtgcaaaccttgttgccattctactcaagctaatatcctaaaccgaggacattataacatttcaggagtcaaaacttcagacacttaacatagtatcctcaggttcatccatgttgtcataaatgacaggattttattcttttatatgactcaataatatcccattgcatatatatgcaatattttctttattcatccattattaaacacttaagttgattctatatcttggctattgtgaataatgctgcaataaacatgggaatgcagatatctctatgacatactgattttatttgctttgtctctgtccccagtagtggaattgctgtatcgtatggtagttctatttttaagttttcgaggaacctccataccgtcctccataatggatgtactcatttacattcccaccaacagtgcataagggttcccttttctccatattcttgccaacactttttatcttttgtattttgataatagccattctaactggaatgagatgatatctcattgtggttttgatttgcattttcctgatagtgatgttgaacattttttcatatgttgtattaactaagccaaacacagaaagacaaatgcagcttgttctcattcatatgcacaatctaaaaacatcgatctcatagaagcagtaaatggacggtggtcaccaaagaatgggggaagtaggggaaaagcgagaatggggagaggattgtcaatgggtacaaagtcacgattagaaaggaagaattagttctggtgtcctgttgcatagtatggagactattgtcaacagtaaggtattgcgtatctcaaaacggctagaagagagggttttgaaggtttctaccccaaataaatggtaaatgtttgaggtgatatgctaattttcttgatttgatcaagtaaaggtcttaattgtttggcaattaagactcatgaatacaaataaaggtcttaattatttggcaaagcatgctgagttttgtaaacaattcagtagtgatttttgagaataggtcaatagcaaatattaattaaaatgtcttctatttatgacctacagctagatggtaaacagatagatgatagatagataactgatagataactaatagatgacagataaatgataaatagataaatatagataatcgagagagaatacctttcccttcacacacgtgcatataggcacactccatttctatcatagttaccaggattcagacattttgtctcactatttttctcaatgtgaacatgcatataggaatattatagtttttgttctgtgcccattttagttcgttttttaatatttcaggacaaaggcaatatggcggtttcactttgtttttcatttttgcttatactttttaaagctcagtgtagaaaagtttgaaaatacacaaaagtattaaattaagacagctgggcacagtggctcacgcctgtaatcccagcacttcgggaggccaaggtgggtggatcacgaggtcaagagatcgacaccatcctggccaacatggtgaatcccgtctctactaaaaatacaaaaattagctgagcatggtggtgtgtgcctgtagtcccagctactcgggaggctgaggcaggagaatcgcttgaacccgggaggcagaggttgcagtgagccgggatcacaccactgtattccagcctggtgacagagcgagactctgtctcagaaaaaaaacaaaacaaacaaacaaaaaagcacctatagtctttctcccataggttgccttcttaatgggttttacaccttttgatgttttcttgagttctgtcccattagcaagtagtattgtacaaaaaaaattttatcatcttttatttaatattttattgatgtttaataattagaattattttaaattttatatgtcattttaaaatgcaatacaatatagtaaactcccagatgtgattgtaaataattaattattctcccattattgggcattgggactgcttccacattttggtcactgcagtgaacatccttgtacatgaatctgtatgttgaagttgatttcattccacactccccttcattcaaggggctccaaccattctcgttttctttcagcttctttatatccaggcatataaagttccttcctgactcgggagcgtcatacatgctgttttctccatctggataagtagttaattctgttcttctttgtgcatctcccgtttcagtaacttcatctccaaagcctttccaggtcactttatctaaagttacaccataatcttgcaaatcctcaactattgagcattattagtctccgttatcattattctccattattctctgtgaaagcatcccgtgattttcttttgtccctattaccacaatatgtgtttattccgtgtatgtacatctttgtttgtttattgtttgtctatacctgcaatgaaatgcctaaggtcaggaactgtctgatgcaggatgcaatgcgctcaataaatatttactgaacaaattaattcatttgctcagtcttgcaggcaaatggtacttctgtatatttaaatatctaaaatgaaagcgttactcgttactgttggttgtcaatcaaaatttaaatgtcgatgtttaagcgtgaaagacctctgtcaagttaatctgtacttacccaaaggctattatgtagaagcgacataaatattttcctaaatgttgattttcatattttaagaagacaatgaatgtttcaaagcattttcttctacacagctatttattctggagagtggggcatatgtttcttaatattgttaaaattggcaaggggatactgttgctatatacaaagaacacctaatcatcatgcagacgttttgtttctggctctcagttatgaaaagcagagattttaaaaagttacctttatatgctaaattaggaatggcagaaggtaatattctaatgtttataagtggttcttctctgagtccttggtttctatgtttatgaattctctttttgaaagaaattatagttattattaccaggtctattcttttacattgtttctaattctatggtgatcttcaaaatagagtatcaattttaaatacttgggaatgaaattattcttcccatatcatttctttgtatggcatacattgtgatttgttgtcccatcattgtttcagtatgacctgttactgcaaaaacatattgagataaatcatcccacatactctcggccaggacagacatcacactgttgcagcaacacttcagatgagccccattcaaccttgtgtttttatagagaaggatgccacatgtttatattcatttctgaagattggctcatattatttattgaaacatactagtttaaaaatctgtccatttatataacacctggtctatctacataacttgaattacataaatataaaactaaacttcccctcttctccagtgtatagcttgcaagcaagtgcatgtgaaataaattaaagccttgtttgtgtttttttcatcatgtgagtacaagacttttcaataaaaatgaattacttttgaacatatttgtttggacaacaaacaagagaaaagatctatttgattgatagtggacagaattttcattaagttcaacagcagaaataccacaattgcatcattcaccttcgtgtatcaaaagaaaacagaaaattagatgtgatgaactctacacaaatgttcactatgcatactttacccattaaatacattatcaagaatcatgtcagcatgacattctaatatagcagctttacaaaaacatgtaatctaatctagggatgctgttgtcctctttaaatcagcttcaaacatattctgggttgatatttctcattcttttttgatccacattgtttattcacataatgattatatttaactgaagataacagcattatcaaagtgaaagacaaaatagatgtttaataggaaagtgagtatcgaatcatcttttttctaccaaaaacatctataattatgaagtatttggttaattattttcacaataatttaaaagtgtacaacttgccgatttttttgtactttctacttttcatgtctcgcatatatctctttaatatctaagtatttgagtcagaaaagagccagtaccgaataatgggaatctcactgaaatgtgataacaatctggggcctggtcctgggacctttatctgcaggacaacttggacaaatatttagacccccaattcctcgtctttaccctaggaataataacacatttttctgacctcatacttcacgtggatctcaaatggaacaatcatctgatagcactttatgaagtatatgaaagcaataaattatcacaataagataattgcaattattctttggcatagtattagtgatgtctttatctgtctgacaaaatcaacatttctgtatggtaactgcctttccttgttttaacagaagatcatgccagaaaagatgagtaggtagatacttaacttgttgttcctgaatctggaatgtattgcagatgtcccagactgatctttgttcttttttttccttacaaatttcttttcacattgacagtgtgatatttctttaaatgtgcaatacatagctaaccttatttgtttgtgtttactaattaaaatatctaaactgcttaaaggagaaaattcagttttaagttttattgatttatacccttcttcaatccacataggattagggtagtatgtaacaaaatttcaaactataaatgaaatattgagttttgtattaaggccaaggatgaggaaaaaaaaagtaagtatatatggaaaaagaatggtattgaatgggagttttgatggagcatgttgacatcatgataatacctattatctttatattctgaatgtcagaacaaaattagagcaattttcccttatttccctacaatacgtctgtcttaataattctaagctttcctgatttcagtagtaatctgtattttgcaaaaggcagcatgtttataagatatcaagtaaactaagtttatggaacttgtaacagcatttttaacaacatttctccctagatagttcatggtagacatgaatttattcaaaactagtatgtagaaaaataccattaacaaaagctctgaaattatattagaggagctgaataatgttacttgagaaagaataaaatgttatttatgatttttggtatcttttacccactatatatggccatatctctgaaaaactttagtaatatgtactaatgcaaatatggtagtaaattatgtctacaggtgctgataccatagtagataaagtatgataactttattttaaaatatcatatttaaataattaatatacagtactgggaaagactattttatctattctctcactcttgaataaaaaaatccagaaaaaaataccttgttttggtaagattatatcaatttatttcccaaatgggtagagggttatttttttctgatcataaacgtatgtctcttcattataaaaatccactaaaagtgatagaagaaaaccaaaagaataaatgtaaacaatgatgccattttccaaaaatcaccttcgacatttttctggatattgatacagtctaaatctcttttcggaagactccctcctgtgtaggttccccaactactctgcaatcttatttcctcttgttctgttcttgtagaaaggagacccattgtcaccatgtcaaataacacaaaatggtgcacgtataagatcattgtctctgtccattatttgccagaggacctcaaactttttcaggtggtgggcaactggatgtcatgctgctccttgtacaacagaacacaattcattatttatatggttatttcattttaagaaaatttaactttcattagctggaaaaaaaaagaagtggtttttaagttgtttagaaatgtgaaattcaattttcatactgcaaaagagattcaactgcaaacacaggcacacatgtctggtgtaagaacgagttgtcatacaaacccaaattagctgcctccacgttgtctttgttaacaagtgtttgtttgctccttgttccatcattcagaaatgctctttagcaggaattgatggaacacagtcgcagtgacctcttcctgtctttaaaaatcgagatgacatttgcccatctgcagtgttaacatagttcctcaaagaccactgacagtggggtaggactgtattgcgcaagttctctcatttccctagaatataattggtccagggccagagattttagctcatttagagcagcaaggtgctcttttaaaattccctcacctattttgggcttcatttcccttatacggttatgccttttccagtctgatgaacattctccttgacagagcagacaagcaaaaggagctgcacactgctgctttctgtgtcgtctctatccctaaccttctcccttctgccccaatcagtgaaccttcgtctttctggttcttcttcctccaaatggaagtaaaaaggccctgaatgttgtctttaccattatcacgagcctcaattcattccaagctcagcttttcctcactgtttatacagttctatattgttcttctaatatttgccctcagttctctgtccctcgtttcttcccatgttcatactctattagaatctgagcacctttgaggttgtccatacagtggcacacatctttgttttatactcactgggatgatttgccattatattgtcaaaattttattctaaagagcttttacaggctttcttgagccattttctcttgaaattcaagatcgttgaatctctacgctttttccttcttaatctaataaacatacacccccacatacacacgtgtgttcctgaaagacagatgccacttgactcgtcttatagattgtctaaattgatcattgtgtgtggggataaaagggtgaattgtataatatccctgatggttcacgaagtctgttcctgtataacctgattagtcttctgaactcttttaaattctgtctgcaaatgactgaggtttggcaatcagcctatttcagttagttgttttcttgcataagaagggtccatatgtactgtgtgaagtaagagagagaaagtacttagatttgctggatgccctgattgttagcatggctaaggtattgtgtaagtaaggagagcagttaaaaatgatattgtttttatttcttaattgaggtaaaattttatataagatgaaacagacttatttgggagaggaggaagagtttgttcttacataacatttcaacctgtcatatttagttgagaacttcaatctgtcaagatactttgtataatattcagattctgccatctaatatattttccacgctttcttactgggtgtgacagtaacttatactgtggcaggtgtataagttagtaaagatattaaatgctcaatctgttaacttttgtgaagtggtcccactgataaagtgacacctcaataaaataaaaatttccattacctcagaaagctttttcatgctaccttccagtcaattcccagccccaataggcacctattcttctgatttatatcaccatagattagttttgtctttttaaaaatttgtataaatgaaatcatacaaaatgtactattttgatcagcatactacttttgagattcatccatgtaagtgtatcagctgttcattcctttattgatgattaatattctattgtatagatataccacaatttatttatctattctccttttgatggacattcaggtggttttcagtttttggctgttatgaataagatgctgtggacatttgtgtacaagccatttgtgagcatatgttttcatttagtttgagtaactctgtagaagtggaatggctgggtgaaatgtttaaatttatgagatattgtcaaacagcacctaaacagttttctaaagtggttgtgccattttgcaatgccaccagtgatgatggagagttccagttactctacatctttgtcaatatttggtcttgtcagtcattttaatttttgctatcttacagaatatgtaggtatattgttgtggttttaacttatattcctctgattactagcactattaagcatcttttcatggatttattggacattcatatagattatgtgtgttgaagattattacctttatgattattgggtgaaaatagtatcattttgaggtcattcatataacttgaagactgggaatgacagacattttcctgttttgtttcttttctttttactttatctgaagagtctactagaatgcagtgttgctgcctgagcagcagggcattagctttgtaaaagctctgttccttggcaaccccaccactaatatgaagtgcagaacatttgaattgtctttgaccagcttcagcatcagcactattttttttttttgctagacccctagtaggtatttaaaagtacagaaatagaatttaatcatgctttttaccaaatgtgctatgctcttagagattctttcaacgtgcataaaaattctgcagtttcaccacataccagtaaaagaaactcagtcactcatttagccatttagtaaaaagaacaaattaactgatgagcatagtggagacctcaaaggtaaagaagacaatgtccctgaaataaagacaatcataaattttcaatcaaaataatgaaatttaggctgggcatggtggctcatgcctatgatcctagcactttggaaggctaaggtgggaggattgtttgaggccaggagttcaagaccagcctcagcaaaaaagtgagaccctgtctccacaaaaaaattttaaaaattatctgggtgtggtggtatgcaccggtggtctcagctactcaagaggctgaggtggaggatcaccagagctcaggggttggagactacagtgagctatgattgtaccactgcactcaaacttgcatgacagaatgagtccttgtctctaataataacaaaatttaatttttatagactgtgaaaaaccattatgtagatacagttcaagtacagtatgattttataggatagataacttttgcttgaaaatgtattcccaatttataggatagataacttttgcttgaaaatgtattcacaatagagttagtatttggggcacacctttatccatttaacaaacatgttttgagcactgccaggtagcaacacgttactaggcactagagtgagaaaagattacagttcctgctctcatggatctcatggtctagtcaactggaatgaaaggattacataagtagaggtaaagacacacatgatggaggatggagaatagtcaaaggtctggagaatgaccaggacgtcactgtgagttgtctaattgcactgaagcatggatgaagaattggaaagtcattgtaagaagcctaaaaaggtatctctcagggatgctatgaggttctgaatgttatgtacgctatttgggcttcaacaggcaggcactgagtattcagtataaatttttgagcagggaatccaccagaagaactatgcatctggaggattaatctggaaagattgtgtagaatgttatgcagtgaaagagtctgagatgaaacagttaggagggtgtattaataacataggtgaagtgtaatgaataaccaggctggaggaaaagcaataacgatggaatcaaccgggcaagaagtataacaattaggatcagtaaaatagaatttggattggaggaatgaaaaaaaaagggacaaaacaaagttgaactgctggtatccatactggaaaatacagatgtcattcaaataaataatgtaatgaatataagaaaccagttttaggagtgaagtggatgttggcttgaaaatatttcctttgaggtttcagtcaaatgaaaaggtcctgaaatgctacgtggtagcctaagaaggaagcgttcctagagagaaaaaaattagaaaagatttacatttgataatttaatcttttccttcatacaagctaaattgataagaaagtaaaacctatagttttcaccactcttttacaaatatccctaaccttttagatattcacatgaataattgagaaaaatctaacagatgacttgcttatgtcatttgtctgctttatccttaggttcctctggcttatatattgttcaataaaatacagatcattgatattgtacaatgtactgataatggggagtgaatccatgcttgtgcattcttttttttttttttttttgatttgcagagggcgtgcccagtcaacaagagaggcacaattgtttttatcatcacctcttctcatctaattccatgaaggagagtagtattaccatacaacagataatgagttggaaaacaagaaacctaacctcagaacttaaggcttggggaaaaataaaagagtaatttgtgtttaatgcctgtataacttggcaagagggacatataaggcttagtgatgcccaacatgtgcttagatgtggattgttagttgatgtcttgggggttctgtaatctaagctaaatgctcaaaatcaattaattgatgttagacacagagatctgctttgatccctctttatcgtatttctaggccttcccattctcaagagcctgagaaacgacagctttccttaataacttgttatttgtggtaggagatgaaactttgataaaaacacaattatttttaaatgtctctttttcactctaggctgttgtatgtatttcaaaaagttacttttgaccctttccagaatgagaaagcaatcaagaagattataatatcttgcttagttttctgctcaatttatcaacaaatatttcttaagcaattattaagctgagcagtgctcagcgctgtacttggtgatataggaaatggggaaaagactgtctttaaggcctttataatagtaattacctcaacttgtctgtttcttttccttaccatttcgccaaattcattgatctatcttgttctcaaagcaatcgccatagttatattgtaacacagcattttctagggtgtccccattaagttgagagtgttgacaagaaaatacaagcttatttatcattgtaaaacttgagacacctagtagttaccctaaattaaatatttgttggagtcagtcacactaaagagaacacttactgcattgaacaatttacctacattagacagcatttaaagactatgccacagcaaaggcccatggaattcttgtgaacacagaatagaagtgtattaaggaacaagcttaattctgttctcttaaagcacaacactttctcaaaacatattttgaaatcacctttgaccattttttttaactaataggtgggtgggagttagggtaggaaaacacaagcagcttcatcaaaacgatattctattttcttcaaatttgtggggaatcatacggcctctcaattttctacattatgctaattatgatattaatctctctgccagcaaatgaaaataatacatattagatgtagcaaatgtcaataatgacaaaattagtcatcatgcagatactcagggattcccaaaatatgtttggattatgattgctagctttgagtttgcccagaatcgtttcaataaaaataagggactcaaacacatttggagcaaaactcacatcataaattttagacatagctctgccaataatgctctcagttatattttcagtcctaatatttcctctgagttccagaccagtatcttcaactgtctgattgatactctctccttcatttctgtctccaatgcattaagtcctgtgtatttactttccaaatgccacttggttccatgcacttctctccatttctgccactgactcctcctcaatccaagcgaccatctttcctcactttaactaccatgatatctcctgcttggtctccttacttctattcccgggctcctccaatccattcatcctccagcagagaatgatgactagcaccttccacagtgtctggctaataggaggtatccaatcaataattgacttacagagtgaaaatataggcatggcaaataccagtagagaactacagggttttagaaccaatgacattagatacttccatcaaatatttacagtgtataatcaagttgacttgcacattgtcttatttttgaaaaacaattttgttggctttttctatatgcacacatacatattgtatcaccctctacccgccaaatggcttttgaagaagtatttatgtggctccaaattgataatacctctagagagaagagaaattagaaattttaaaatgacctatgcttcctttcgaatatcacgtcctgagacagtgttttttgagttacgtgcaatatgttccacgatgaaacatttaatgtgttcagaggcatgctagtaatcatgtagaaagaattttatgcctgaagtcacatgttctataaccaggatcacttaataagaaaacaagtacagctgtggacaagatgcctttttatcagggaaaggccaatttgttttctttgcaaatctaagtaaatggagagaaaaacacagcccttaaatgttttctatttgtcctgaagttctcatgaatgagttagaaggcgagaaggattaaataaatccttgaacgtagagagagctaacatttattttagcaaactaaaacctattcgctttgcaaagttctgttctgtactttgtaacaacagttttctttaaaacaagagccaccaattcaaatgcctttacagaatgattgaatgctttcatgccccacctaaaggcattcaaatcattaatcaaacaaagttctaacgccaaaacatgtctgggaccagatttaaaatgtagccctcagtttcagagggcaaaaacttaacatatttatattttcctcactttaggtaacactgtattgaatctctgcttgaaattgaggagcacgtgattttttctttttggcccagggcagcatttcttggaagagaaagaaaaacaacccaagatacccttacaaaacatgtagtacttaaagctctttatgatgaattaattttggtatacacattaatagcagtgataataacaaatctatatatatatatataattgatatgaataagataaatacatcaaaaggaaatttcattacaatttgatattaggtaaatgtcccattaaaataaattgctactgtacataattttccttcagttcattggcaggatgtttgctttggaaaataaacagtctatttctagttttagaaggaattctcattattcttttatagcaaccattatcaggagcagatgggaaattgtaccaagagcatatctactattatacctcacaggaaaaagagagtattaaatgaaatctaacaaggcctgctcctgactctagttcctgtaacaaatgaacacacacatttgtatggtttcagcatttgtattagtaaggtacaataaatgtttactgaaattgaaaaaaaaaaagataacaggagaaagaagaggctaaaaaggtgcattttatttctgatcgttcattgtaaagactgctcctttttaaaataatcaaattttattttatatacagagggtacatgtacaggcttgtcacaggggaatagcgcatgatgctgaggtttggggtacagatctcatcacccaaacagtgagcatagtacctacctgatgagtagtttttcaaccaatgcgcaccctccctccttcccacatctactagtccgcggtatctgttgttcgcatatttacgtccatatatgctctatgtttagctcccacttataagtgagaacatatagtgtttgtttttcctgttcctgcgttaatttgcttatgattatggcctccaactgcatccgtgcttccgcaaaggacatgatttcattctttttatgactatgtagtatttcatggtgtatatgtaccacattttctttatccaatctaccattgtttcacaactagatggattccatgtctttgctattgtgaatagcacaagacaggacctttttatttgactgagttccttgcaaattactaataaaagatctggaggtccttagttaaaagttgaatctgtagtgccgttcaaatttagagatgtattttctgttcaagagaagaaagccctcattcggtcatgcttaatattcagctgtaaagtccaaaacatatgagaatgacacaaatggaaacattttataaatacctatacaaaggaggggcacttagttcccctaggcctcttaaaagtcctctagaaagagggtacttttatgctaactattaaagatgagtaacgaatttgtcctatacaacttaacagtatcgtcaaggaagtagaaagttactcagttttactgggcattggagctaagcttgaaagtgaggaggagaagcggcaggagacggagccgagaaggcagtggggagaagaggaggatggtcctttccatgctccctgttgtactaacatgtttggatattatcttatacttcatatatggactggattcttgtccttctcattctgagctctccttgaccttgattcttacctcctataactttcattctttctttactcaaaaaaaggccatttatttcagccatttttcactgttttcttatccttcctagttgcttttctatactatttttccactcttttttttttctatactattttgcccttctctccattttcctaactgctagatttccccaattttagccatctttcaattgttctgactatcctcaggtgctcccacaaggttatcagaccttccaccaagacggaatccctcagtctatggacaggctaagttgaatgggtcctggtgctgtgcttagcatatgccttgagtatttgtgcatttattttgcttctttacaaaaatccatcatccgatagaagttgaaagaaacttgctgaagcacattaaaatctctgaaaacagtattggctatattttctaataattagcatgactggttaacttgctttatttatcattgaaaaaagtatcagaaactgtatatcaaactcctgaattcttggcactgacgaagagacacaatgagaatgaccttaggataaaaaaacaagataaagcaccatatttgtaggaaattgcaccataaaagtctgtttcacaactctcccaaatttcattttattacatcttttctcttgaccaatcagtaaactcggttaatgatttacctgtctcaaaataattcatgaacaaaattacaagtaaatctcagtattggattcttgaaacatctccttgttcaatgaagtttcctttttcttccctctatttccctgtatttatcttttcttccagttgcattttatctcttctgtttttttatcttgctccctagtttgtgattttttgccaattttttatttcctacataattcatccaatctgtcattgtacaatttcttataactgcttcttagcttattccttttcttcatttgtcacattctatttttcatctattgtgttttcatgcagttttggaaagttttacaaatagacttttaaaaaaatgtacgtaatgttttcatagaaaaggtagtggtttctttttcttatatccttccctgtataaaaataaaaatgtagcagttctttctttgcctatgtttcctctttccttcccccaatttgaccagacttgaaggacttagatatgtaacagtgttattttctataatttaggaacagcttttgacttaaaaagcagaagagaagttgaaaataatatagtaattctacatgtccttcctgcttcccaactctctgcacatgtttgtaacctcccctttcttttttagtgtatctctttcatatacctttgtccccagaaattctgattcagtagacttagaatggaattctgggcttttatattttgaaaagctccccacgggagttagatatgcacttcttattaagaatgaatgcttaatattggaatcaaaacacaataagctttctaactatgatgaataatccaacagatttaattatgattttctttttgtccagaaccaagactagatgttaattgccagagaaatagataagaatgcctatgacagcagtacattaatatgatatcaaagcttggaaattttattggtaatgaataattcagtacttaaaatatttagaagctatagaattaaaattaattaatgttgttcactgtgtgaataaagttgattgagattttacatttaattttgtaaacccagtgttatcttttccagctcagaaaacaccacatacaagctactactttctgttttgatcccttatttttctttcttatgctttatcactgaaaactctccttgagcaggccatgcactgtaaatatttctcctggttgcaaaaccttctcatacaaatgcagtagactgtgtaatgagctcttctttcacaaaattaaaaaaacctgaaagccctgatttgcgattctatacaaatgagatttagatctaacaattttaaattattgcttcactcttagctgttcaattctatctcttatttgggaaaccgaaataataaaaccattgctgattccacaattaggttgtaaaagtcaccgtagccatcagccatgaagcaaaagtgccaagatcaaaactacaaagcaaagaggctgagataaaaatgctgcagcattagtttatagcattataagcagcaataagaattccttgattgcttaacaaagactcaaaaggcatttactccattaccttacaactcaaagaggtattcctggaccagcagtattggcatttttttgaagtttgtaggaaatgcagaattttggtgcctccacggacctaatgcagcagaacttgcagtttagtaagatctccaggagatttgtatgcgcattaaagtctaggaagcaccgctatggtatacatctgatgtgtgcccatgcattttttaaaagtatgaagtaatagttgtaagtattggacactcttgaaggaacaaataagagccatggtctttactctctaaatacctccctgacatctatgttttaggcaaaatttttttcccatttcagtagtcactgatgcttgcacgatgcagtttattccaaaacaatggtgattctcatgtaatagttcatgttgccttaataatttacgttgcctcaagttctctgcccaggccccaatatacaccgagggctgtactcctcccctaacgcctgctctcatacagtggcatagagcccagttttatgctcttggtcacatcatggagattgcacaccacaggctttaacttctgccgtactctcactgcctctaaccctccatatgcctaagttctacgattctttaaattccaaattgacccagaagtctcctccgctcatccttttcactgagatcatccctcttctggcctaccatttgttgatcaccttgctttttttttatcctactgtatgtagtataacaaattatcacttgcaactgtgtcttattttttcaactagattatgtactgcctaagacctagaaaattgtgcttatttatttgaatctctaggaggatcagtaatgggtattaatactaatgactccatggtgatgatgagcctgaacttcctcccttcctttctttctacctctctcctttcctcccttcttttcttcctccattccttcctctcttcctccctccgcttcttccccacttcccttattcatagattcatgcgttcactcagcaaatgcttactgaaaccttccatgcatcagacattgtactaaacaataggaaactatcatgaataagacacaatatctgacctcaaagaatttatgatataaaagtaatggcataaaccgtgattacttttgcaccaacctaatatatagacacagtttgttatgactggtgtctctattactaagcaatgactgtcacatgcaacgctgatctgaacaggtggtaaagagtgagatgtaagcaatggagcaaagccaactagttacaaggaaatatcacatgtttactagagcacatctcatgggcattcaagagagtatggccaggacagcttgtgaatagttcagtaactgtgcatagttttatattcattgtgaggcaccgtgtcaccggtttgctgatttacagagtattttaattgctaactgtatgctaccaaaatttccagtattcgaaaataattttgcttgaatgtagaaaaagaaaaaagccaagaaatgtatgtgaaacgagagtctaagggagctttacctcagtctcagaaaacatgcattccttccttcatttaggaagcatgtactggggtctactgtcagcttgctattgtgtcaaggagtaggagaatacaaaaatattagagaatatgaatcacatctattaggagagttttctacatacgcacattattctgtcagtgacataaggatttgagtcattcagatttaaatacggtaggtacctcaagttctcagatattatttcattttctaaggttcgtatttagttaatatgttattttaatggccttacaaattctagattatcttttttaaaaagttaaatagaacgtaattgccatttttatttaatggtaaaaagcatttttgtttttgtgtgtacttggttgtaatattctccttttcaattgagctatttttctgatactttactcttaaaatttcattcaggaaaaaagtaaacaatatttaagcttgacaatcataaaaatgctctggtgactatagattattttaaaatttattactgtagcttagggatatcttgatgggatgctcctgaaagcaattaattctcagttttttgtggcttctaatgcaaaatacattgacgcagacagaatttgaaatgaattttcttctaatatagcaattaattttatttaaatatctctagagtttttttttaatactgtgactaacctatgtttgttctttttcacctctcgtatccacgatcactaagaaacccaaatactttgttcatgtttaaattttacaacatttcatagactattaaacatggaacatccttgtggggacaagaaatcgaatttgctcttgaaaaggtttccaactaattgatttgtaggacattataacatcctctagctgacaagcttacaaaaataaaaactggagctaaccgagagggtgcttttttccctgacacataaaaggtgtctttctgtcttgtatcctttggatatgggcatgtcagtttcatagggaaattttcacatggagcttttgtatttctttctttgccagtacaactgcatgtggtagcacactgtttaatcttttctcaaataaaaagacatggggcttcatttttgttttgcctttttggtatcttacaggaactccaggatggcattgggcagcggcaaactgttgtcagaacattgaatgcaactggggaagaaataattcagcaatcctcaaaaacagatgccagtattctacaggaaaaattgggaagcctgaatctgcggtggcaggaggtctgcaaacagctgtcagacagaaaaaagaggtagggcgacagatctaataggaatgaaaacattttagcagactttttaagctttctttagaagaatatttcatgagagattataagcagggtgaaaggcactaacattaaagaacctatcaaccattaatcaacagcagtaaagaaattttttatttctttttttcatatactaaaatatatacttgtggctagttagtggttttctgctattttaaacttgaagtttgctttaaaaatcacccatgattgcttaaaggtgaatatcttcaatatattttaacttcaacaagctgaatctcagttgtttttcaagaagattttagaaagcaattataaatgattgttttgtaggaaagacagatctttgcttagttttaaaaatagctatgaatatgactatgaagctaaaaaaagtgatagtgtcacttacctctagtttcaccacatttgtgaatacattcttgaaggggaacttgagccaaagaggtacaagtttaatggggaaaacaaaacctcaaaaaggttactgtcaaattcaatcatcatttaaatttcccttggaatgtattgaaggcacagaaagccaaatgcgtgctgctgcagttggaaagcctagagagtttataaatgggattttgtattatgcttccagttgttgatgttaatgtgtcttgtttcgtaaaggaagacttggcctttatttaccaaatgagactattgttatgaacaatgaaaacttcgttcttttgccaagctcttgcatcccacccatcatccacataataggtggattttaatattcaggaagctagaacaactcattgatgaatatctttcgttaagatgtattaaaaagaagattttggaattatgtcagttgtctttgcccacctcctctttccctctttattcatgttacattattcagaaagtagatacaattcatattttgtacaaaataaacacattagttgacctaaacacacacacacacacacacacacacacacacacacacacacacacacacacacacaccccttgccaaagttaaagaattatagcctcatcaaaagatattttgaataattaagtcttggttttgaaaatcttcttgattatagatagataaaataaagaactaaactttgtagttaaactacttccttaggtaagtcatatacttttttcccagattgaaattcttctcttaatcatacaagtattttattatttagataactgatgtgcttatactatgaacaggtataaacctgtataatgtcatttctgaactaggctcaatctaatccaaattaagatggtaagaaatgagaaaattaaaaaaattgaataccatactataaatatatatatacggagagaattcataaagtggattaaatcgactggaagattatttttctataatatataaagtattgtttcctattttaaatgtcttactcatatagtatttgaatagagtgtattaacattccctctgataactctaattcacctgaattttcaaaatcttgttatctgttattgggctctaaaggcacattataatttataaacaaagatgtagcaatatgcctgtttcaccaaataagctctaaaattttagatctttctaattttataagaaagtggtatatgctgactctgttgtgaaatagtatacaaattttaagttaattacagctagggatttggctgtaattaggaaaaaaattttcccatttaaacatgttgacctacattaaatattgcacttcagtgctttaaaaagtcaagttcagcttccttgagttttttttttaagctgagcttttaaagttgtctatttcacgctacattttaaaaataaatgttaacatatttaaatttccactgagaccacttttgtggcatacttcctcaggatttttatatcacttaaattttatgaaatgtaaaaatgtaataaaatataagtactggttctaccaatatactcatagctatttctaagcatccagtagcaaatcaagtaaaaattaataaaataatattttatgaataatatgttaacctaacaattaattatagaagggctgtaatcacgaacctattgctaatcaatagtgtactctcagtgcaacgcaagcagatgttagaagggaatagaagttatttattgcaccggtgaaaaatatataagatgcctattcaacttaacaacagtagtcttcgtttgtaatggactttaagtacagcggttagaaatatttaacattttttagtccagggacatcaatgaaagaaagtgtataaattcaagctagatgtctatatggagccctgtagttgcaaaactttaagtcttctgaaattttaagatattagaaataggaaaaaaaatctcaaaagttcaaataatagtggacatccaagaaggttagtctatgttggaagcaaatgaagtgtgaaatgtagtcagttagcgatgcagtttaagatagacaattcactacagcttcaattatgtaacagaagaactggatacatctataggcttaagcatgataataatgagtttaatgatggcgtagccaccaaaactgtctttgtacacgaaggaggtgcaaataaaaacctatcatcggctgtaaggggaagtcataggttgatacaaagcaagcctgtgtacaagtctttaagcaagcgtccatgaatagcaaggggcgccatgctcttcactggagaagaaaattacctatttgtctttactaacctctaactgaaattaagcattccttttcattttgaaagtaggcaaaaaaatcacagtagtacaatcagtacctatgaagtcacagatatgtacacatctcattacagttataataaatatatcaaaatatcatttatgcttatcactacttcaaaactgcagtacttattatatgtgctacagggtcttattgttgggctttaaaacattattctgaggaatgtcaggcttcaacagattgccaaagaagtccaaggcataaaaaaatgatcctagccagctgtctgtttatctgcccagaatctcatcctaatttactatggtttcagtcattttaatgtgcagtcactatcttcatacactccttttcttctggagtattctaggagaagacataccagtcgaggggttctggggagccaggccttcaagcaatggattgctgacaacataatgaagaggattttacttagaataatgtcagttgataaaagtttgaatgggagacggaagcaaggcagtgggaagtggaattcctaaattgaggaacctctgaatcataatccttagcaataataattaagatttcaaaacattataattctttcttcttttagacaagtctgatattgcttatcccatatcacagataaggcaattattctactaatatgcattaaggaatagtggttttaatttaagtgttaccttaatgaaaataattttgaattttttccttccccaagtctttttgtgaaaaatttcaaacatatagaaaaattgaaacaattgcaaaacatatgcccatttacactgttttcctccccctaaattcttagagtcaacaattgttaacattttgccatatatgctttttttctctcgctttctctaccctctttctgtatctctcatatatagggcatcacacacacacacacacacacacacacacactttttaacatttttgcaaataagttataaataccattatattttacccctaaataattcagcatgtgtcgctttgaaatacagacatgccatatataaccatgcctgtttattatgctctcctccaaattaaatataatactgcattattgttaatatccattccatattcatatttccttaatagttcaaaaatgtcttttatattttgcaggggagttagtaccaatatcttatcatggctcatgcattacatttggttattattatttttcatccttcttagtctaaaatagcccttccacatttttttcaccgatattgaaatttgaaaatgtccaggacgctagcctcaaaaaatgtctcatctttcaggatttgttttattttttttcccctgatgggatgatttaacttgttctgtagtctctgaatttctagtaaactggaagttaggtctaaataagacttcaagagatgcatgtcaaacatgtttggcgagaatacttcatatgagatgctgtgtattttgtattacgtcacatcaggaggtgcatcatatgaagtagtctcactaaatgctgcaaagttttattacttgcttcaggtggtgactgacagatcttgcattataatgtcacattttttcttcgcaattaataaatcatctaatggctttagtatccattgatgatccttccctaactcagttattacactggggcttgcaaaatggaggttttcctaatctgacatgatcttaacatttaccagctggctttcttctgtttgaaaaaaaaaaaaaaaaaaggtttttcctctatatttatgtcaaaatggactcataaatttttatttattcaatatattattatgaattacagttattattcttgcccagagcttcctgctcaattgtcccaggctcaccttggactttgcctatcccagatttagaattacccatttttttcaaggaactctggttacttttagaggtgaatagtacgtagaaacgtacatctgggtagtagccccttctcaatggaatgtgtgcacctttctggcaagcagtcccaaaggagataatattttcagattaccttggaaatgattcttgacaaatctctttcagaatacatggaagttaaaagtaagtctagacatgttaaaaagcccttcttgtgtgagacttcatgtacggtcattaagttactactcctttaaacctctctacttctgaattcttaaaccaaaatgtactagtatataatctatgctggtttgccatgcaaattaatggtgtaaataagataatgggaggcattcgtaaatgtacttaaaggaagaaattattgtttaaagaccttagctcattgtttgcatgcaaatacacgctgttgattagaaatgagccttatctaattcattaaagtaggcctggttggtcctcttcttgaaagtctccattagcaattcatattgctctatgcgcttccttgtaagacaactgttgtctcttaagttttctttaactttggcttcttacaaattcagaccccacccccaaccaaatagctttcaaccaaatagcttttcagcatcttatttcctacaaattaaaagcgaatattttaatgactcaaatggctctttacagtgtgtgcaatatgttaaatgtacccagtatatccgtgtgaaccagtgctacaagcctgctcacacattcacattttgcccccaggatctgtcccgtccgcttgctctgtactcaaacttcctttttttctcattgccagtttagaccttgactctccatccagcccagagtttggaaactgagtacccacaggctgaatcctgaatgcatgcagtatttttgcatagccactgtttttaaataattgacaacttttaaaaattgagagacctcattttttaaaaaaatatggatttctgtcttcttttgaaaatttagatctggctactaggcactcattactatattttctcttggcaccatcacctacaactgagtaacagatgtttcattttcttgctactcaaagtgtggtctctggtccagagcacagacatcacctgggagttgctaagaaatgcagaatctaataaataacagtcagcatttttaataagatttccaagtttccaagtgattcatgggcacattaaagtttgagaagcattgcctggggtaagcaagctttgtcctcagtttgcagcacctgtcccactttgctcatttatattaattgcttttccatagatatttgattttatagtacctcatgcagacctttgtatgatgatgacggttagggtggtgatggaagtgatggtgataacacttaatattgccatgcactgttccaagtgttttacgtagctcaatacttataacaactctatgaaatagttgctattctccttttaattttacaggagggcaacgaaggcacagactgataaaactctttgcccaagattgcacagccagcaagtatttgaaccaggatgcagtcccgcagtctgcctccggagtccttactctagatcagattttgcattatttatcccagttttgtccatcaggattctctggtatacacttgcaatttcttcctaccaaccttctccttacctttgatggccacacgtagtagcaaaagaattgaacatagaatctgttctgacctatctttccaaccctgtttttcataatttccactatttctgtttatgtctgaagctttgaatgacctgaagttttctgttcttcagcttttgcaaaaaaaaaaaaacaaagaacaaaaaacaagacaaaaaaaaaaaaaaaccgcttcctttggttgaattctctttccccttattttttttcccaaaatcttacacatcccttaagactcatcttaactgctattacctcaatgaattgtgacctgctcttctcaaacataagcagtttattctcttaaggttttcttgcccctttttataacactcatgtaatattgtatgtatatatcatgtatcatacctatttacatatgcttttcccccagcaagattaaaagcttcatgagggcagaggactctcttattgttatctctataacccacagtacttaccagaaagcctgatatattgtagatggccagtaagtactttcttaatttaaatcgtaagaattttattcacattcagattaaactgaagatttaaatctttacacttgacattattatatagattaaaaatagatctaaagagccagaccaatttttctgtttttatcatgttatcacatttccatggatacgtttgcaattctagaaattgaccttgatcccttctagtcttaaaaaaatggaaggagtttggttaataatattttaggtattcttcagaatttagtacatttaagagacaagtaacttcaatttatttagctagttatggcaaaaagcagctctttgattcaaacattttgtacatttgtttatcctactctcactgtatctcaactaataccttttaagtgaattaagcaggaattagccctgaaactgaatgttttagcctcatcctacatatagccacaagatgttttagatgcaatccatatcaccaaagagctatttttagattgatcagagagaatcatacagatattattattcacaggtgtcaatggaaaagctggtctcttcccatctgttctctgatgactcttgaaaagctttcaagggcattcataattcttcatcaaaagactatgaaaaatcagcttcatagttaattgttttatgtcatattttattttttcaacttggctagttctagtgaaacagactagctggcaccaaatatgttgttgcattggctggtaatgatgataccactgtgtggagatatacaagtgaatgtactttatttgtggccttccatgaactttatgtgcctgggaaagtaggagttagggagagtttgttagggaacgtgatctctgggatgggtcttaaaggatgagaagaggcaaatgaagagtaaatggacatgccagagagaaaaagtgacaggagcaaaatcactgaagcaagaaaaaatggcctacattgaaggactatacacagttcagtataaaaaggctctgttaagcaagcaccattgacttaccctaaactcttcattttctacatataaactgcccaattcccactccaaacctattgatggatattagtaacctattgatgtttttgaaaggtgttcaagtatcctttctggtaccatgtaccttggctcccaccatttgagagtatgttctccaagaggcaacagtctgtggttcctgacctggctatgcaagttattcttattattaaaattgtcctatttaattaaatatcatgaaaactaatgaaatagaaatgaaaagataagagaattgtggtttctatgaatactaaattgaatgctttggaagacttgataaaggtgattagaaaaaaaaaaaaggccagatgcggtggctcacacctataatcccagcactttgggaggccgagatgggtggatcacctgaggtcaggatttcgagaccagcctggccaacatggcgaaaccacatcgctactaagaaaatacaaaacttagccagacgtgggcctgtagtcccagctacatgggagtctgaggtgggagagttgctcgaacccgggaggcggaggttgcagtgagacaagatcatgccattgcactccagcctgggtgacagagtgaggaaaaaaaaaaaaaaaaaaaaaaccacggtgctgttgaattagatgtaggtaagacaactgtttaagattgggtatgagggatagaatccccaaaaaatggaggtattttgcattgagattattttcagcatctccaaatctgactgtaattcaaagaaaccaaactaaaagtcacagattatgaaatgtagaagtgttttatgcaaaaagtaatatgcttaacttcaacctgtgggcttttactccaggaaaagtctcggaccccataccaaatgagaagtaaatgagtgaccacttgtatattctaagaaaaataaaatgtttgaagatgtgtaaacacatttatataatccctccaattttacaatatttttccaaaaaccgcctatccacttaccctaatcaagtttgataaggggacttccttttatatgtaggaaggctgaaaaatgacgccatgacaaatgaaattgtcaagatggaccaggtcatggaagatttgaaatctcaaagaattttttccagggtagaatataaggatgttgggacgtttttatatgctttagatttgcatcctcatatgtccctttgacagttgagctcagagtgaaaaaaagagagtgaaactagtggcagggtgactcaagttagagacaatgagtaagcagaatagaactttaaaaacctgacagattcaagaaatacttgatgaaagtggaacaatttagtcgttaagtagatgggatgatgaggggaatgaagggacaattctaggatgatcccttttccaggttttttgcttgggggaactggctgcatggaaggctgttagtcaggataggaaatacaaaggagagtaactgaatggaaagaggaaagcaaatcagacatacagagctcaacttgggatataatagtcttaaggagctcttggaacattgaaaataaggtgatcagaaaacacgcatttgaataggtaagtctgaacatcaggaggaagacaagggctgaagacactgagccattttgctgtcaatgtagagatggtggcaatctccattgaactaactgcttctcaataaggtacctttctcaagtcattaatttgctaaccagtaaacaaaccagaattcccagagtacacattaaccattaagcactgctgtggaaaaggagttcaggtgtcaggaagccaacgtggcagatgagcactagtggtgacaaatgaaccaaagtgatatgggtgatctttatggggccacagagtaccactgtaaactatcacaaatcagaagggttgacaaacaaaatattggggataaatcagggaaaacctaccacaacatacaggaaaataagttcaaagatttcatcctacagattgcagataagaaatgagccctttttatttggggcaccctagggaaagagtagatgcccatatgtatatttaaagtatgaatacagcatttatttgaatatactgcaaatggtcaatacaagggtagctacagagcccataacatgaaaaggaaacacaaagaaatacatgccccagtcagactccttacttgggttgctgtaaattctctctccctttaaggttattgcatttaaagtctatctgttgattggacccaacagcagctgcaccaagactgtaccatttttaaaaaaaaaaaaaaaaaaaaaaaacaggccaaatggcattctgcatttattttccttgttgctgaagaaacttgaattgtctaccctcaaagcctgtcctttgagacacattttataattagaaacacttatttacaaagttctttttatgttagaatcacaaatcataacactccaaaaaaggaatacactatcctcaggtgagtgtcctacctttgtttacaaaagaaaacccaaagtcctaagagaaaaatgtgttgatcattttattgattccttaccttggtttaatatagttaatggatgtcttagatatgtataataagtctattatcatgttccctttaaaattctcttttgttttactaattatatgttgtcatagtttgaccattaatataagtctaaatttattataatgtgattttttctacaaaggttaatttgaattaaaatattttattttatctctctctactatgataaatgtttttaaaaatcgtttgtaaaatgaaagtactatatttgtgtaagctgccaatctaacaatttatcatttaccattatgatggtgaatgtataacaatccttatattcagcagaaagccttatctctcatttcagaggaatcttgccccggttaattattctgtctcttgaatgcacacaaacacaagcatatctttaccctttttctgctgcctcactatccctgatcaggtgaatgtttttagctcctagattacaatataaatatattcagacattcctttccaaatgcattcattccactgtacttgtcagagttcatagctgtgaataacagaacccagtttttgttgatagaagcggaaacggactttaggagaaagatacagacctgttcccattcctaaacaaagggatagaaaaccagctcaaaatgggcagaactcaaaaaagaggctcagctccaagaactatagtccaaatcataccctagattggatctcgaactcttggactcaagcgatccactcatcttagcctcccacagtgctgggattacaggcatgtgccacgacgtctggcccccatacactagatgtaaacgttgccatgcaccactctaccactgcagacactgggtgaagaatgtcattgctactggaaagaattctagatagtgccttataattctgtcactcattccagattcaaaaactgaacttcccccatcagattccatttgtatttggggattttgttcgacataatcagggcattcagattctgggcaaccaaagttaacaaatgtctcttacttcccctttcttgttattattcccatttgaatcttcttcatagttagtcactgttacttaaacacacattctctattatcacatttccctctcctctcttttgctgtttgcttttgatccaaaccactgctcagaaaccattattgccaataacaacaatgatttcttgtagttaaatccactggacatatcttagtcctattatccgtaggccatgtgccattaactgaacactttccgtattagcacttggtcctatcttatcttccaagtcactaatcttatctgaatttattcttacctctctatgtaattccttactatattgatgacactccttgctttacctgccccttacatcctgatgtttctctaggacatgttctgaaccctcccttcttctcattctatacggtttccctgattgttatccatagcaacaaatgtagctttcactgtatcaattagaataatatctagggagattaaaaaagaattatagtaactgaaacaaagtagaaatatattcatcttcttgtagaaggaatctgccagtaggtagtccgaggttggtatcattgctctatgatgttgaagatccagatcccttctgtctcacagatctgccatcctttggtgaggtccttacactcatggatcaagatgactatcagctctctatctatcacaactgcttttcaaaggctgcaaggtgtaggaagtggacaaaaaagggatacctctacccttttaaagggacttcatggaagatctacacaacactttagcttgtatgtcattggccagaatttattctcatgacaatgccaaactgcaatgggcattcaaaatgtagtggaatggatcatgggctaagcagctaagcagtctctaccaaagtcaccgatttcattttatggcctaagtctaatatttggcccaatatatagtttcagattagacctacatatgtagcttcaaatggaccatttcctcttctatgtctcaaagccatctcaaagtcagtatatccaaaactcaacatgttatattcctctcccaaaatctactgtgggtgatatcactatctattcatgtacccaaactataaatttggaagttacaagagctagtattaatgacactaagttttgtgcatttactctatgaacaggactttgataagagttttacaaatgtttcccacttaattgtcgcaatatctcagttatagagattttatacgtccatcatctcacctgactcttcgagatcataagcaaagcatggcagcattcttatgtccattttacaaattaccacattaagcacaagaaaaaacaagatatatgtccaaggctaaccaaagttatagaaggatcgagaactaaaagtcagtgatttagacccagatctgtgccttttcccttattgttacatatgaccatatctagctatgtgaacaaagcagctaatagtgacgacagggtagaacaaataagaaagtgaatattccccactacatttatgattatttgccagtttaacagcttcaagcctgtgtcttctcagatatgtgcttcctcttatgtctaaggaaaagtactatatttgatatgcttttatgaactttcttttttgagatggggttctggctctgtcactcaggctggaatgcagtggcatgatcacagttcactgcagccttgatctcccaggttcaagcgatcctccaacctcagcctcctgagtagctgggaccacagacacgggctactacacccagctatttcttttttttttttttttttttggtagaggcaggatttcactgtgttgcccacctggtctcaaactcctgaggtcaagtgatccacccacctcagcctcccaaagtgcggggattacaggcatgagccaatgtgattggcctgaattttttaaatttaattttattgaggtaaaatatacctctatataaataaaagtaaatatacctttaccatttttaagtatacagttcagtggtaataagtaaatttatgttatttttcccctttgtcccctctccctactcctatttctgatctctggtaaccaccaaggtagtgtctactttcatgagatccatgtttttagctcccacatgtgagtgacaacacataatatttgtctttctgtgcctggtttaccttacttaaaataattacctccagttctatccacgttgctgcaaatgacaggatttcaccctttgtatggctgaataatatcccatggtgcatatatatatatcacattttctttatccattcatcctataaattttaaatggtgtggaatttggagaatacttaaggaaaaatgacgattgtgtaaaaggaaagtatctacaaaagcaaggtttatctaccccataaagataacaagagaatctgtgaatgtggatacggtttctggagtgtttcagaggttgaaagattgtgaagaactggatgggtataaaaaaaagtgaggaggagaagaaatgaaagttctggaatgttctgtaaattgtagatgagttccctatattaattttaaaatgtaaattgagattataattattttttgatgatctatttttgctgggctgattctctgttggtgtaactctttaacgaatatgggtcacgtgggaccctggattttattagaattacatgtgcgaatcaaattctaactttatgagccaatataatgattgtttttttaatgattagagtctatccatgacaaaaacagcttgtttctcctactgacttatttggtgttttcttgctaattagcctttatactaggcagtagtaaatcagagtacttggacttcaggttggccattacataaacctggcaactaaatgctgggtaataatcacctatcttcccacctgtgtttattacctttggaagtatgtaacatggtatctttgcgtttatatttttaatttgttcttttttctcttgcaccagctacttaaattatctgagcttccttttactaatccaaaaataaagataatagtacatatttatagagatgttgtaagagtaagaggtaatgtaaataaattggctagctctatgcccagcacatgagtaggtgcttagaagttagtgtctgggtacatgacttctggggatgataaagtgagtagctcgataaatctccccaagaatcagtaaaatgggacacactggagaaaacatcttatgaccctggatatcaaccaacggcatatgctaaattaaaaagtgattatttataaaaagtactaaactttgtatatgaacaatatgaatttgtggtgtatttgcctgtattgcccccagtccccactcccagcttggtcaagcataatagttctatcaaggtagaacaagccatggaaataagcagcttcatcaccacagggactgattttatttgaagcagaagtttaaaactccatgtccagaagcattgtcagtaacggtggagacctaggcggcaaacaaaaaggcagaatagcaactcagctggcctaaagttgcagtcttgattggaacaagtaactgactggcagactggccagaaatttaatttaaccagcatatctgcaaaatgaggcagccgtaataggcctcagtaaggactccttgtgtctccttcatgaaaacttaaaatgtgcctgcatgttgaatataccctttaacacatataaagaacctttagcaaaacttggaagtcttactggcttgaggtatttaagatcaactgctggccaactattgactaatgcaaattaagctatgcttacctctaggaaactaggcatacagtttgtttctgttgtttgacagagaaagaatatcaacagccacacactgtggggaaacagattccacagatttcatctaggcaagttattaaaacttcaatttaaaaaacgctgggcataagaaggaacatcagaatttggggctcctttaatatgttatttaaaatgtcaaattttcaagaaaaatttacgatacgttcaactgtgacccattctcatggggaaaagcagtcaacaaaagttgtctctgaattggcccaggtattggcagatagagacttaaaggctcctactataaataccttcaaacaactgaagaaaagcatgtttaaataattaaatgaaagtatggtaacaataactacaaatagagaatctcaactaaaagatacacactatataaaagaaccaaatgaaaattctagaattggaaagtagaataaccaaaatttaaaaaaatcactaatggggctcaagagcagatagtaagacagaaaaaaaaaaaaatcagtaaatttgaaaatagataaataaaaattatccaatctgaatgtcagaggtaaaacagtataaaaaacgaacatgagtcatagctttgtgtcaaaacattgagcatatcaatgtagatgttacaagagttccagaaaaaaagagaatgttgttaaagaggcagaaaaattatttgaagaaataatggccaaacacttcacaaatacggttaagctcaacaaaccccaaatagaataaacacgaagagatcaataccctaaaacataagagtcaaactattgaaatagtttcatttgaaattattgaaagacaaatgggaaagtctttaaaacaaccagaaaaaaatgactcctcatgtacagggatcacatgattgatagttaatttctcatcataaacaatagaggccagaggtattgaaatgacatattcagagttctcagagaacacaaaattgccaaccaagaattccgcataaaacaaaactatccttcaaaaatataggtaaaataaatatattaccaagttgagaatgagaatatttcttgctagctgacctgacttacaagaaaaaactaaataaagtcattcaggctgaaaagaagtgatattcagtaactcgaacccaaatgaagagataaagaatcacagaactgataaatatgtagatacatataaaagactgtacaaatatagatatatgtttttcttcttttaacttctttaaaagacctaagattgcataaaaattataacattgtgttattgtgtttataagcaggaggagcaaaaatggagcttagcagagaaaaatatctaaattttactgtgttaaattagtttgaacttaagtaaattatgatcaattaagatgcatatgtaatctttagagcaagcactaagaaaataaatagttaaaaacaaaatttaaaattacacactaaaaataactaacaagacagtgcagtaaaggagaaacaggaacaaaaaagacatgaataagatgtgaaaaaatacaatatggcacatgtaattgcaactaaaagttgagaattcccattaaaaaaatctgaaatttgaaatgctctaaaatgtgaaactttctgaaggttgatataataccacaagtggaaaatttcacacctgacctgtaatgagtcacagtcaaaacacagccaaaactttgtttcatgcaaaaaattatttaagatactttataaaattacctccaggttatatgtataagatatctattaagatatatatatatacatatatatatatatacatatatatatatatacacatatatatatatatatatgtatatatatagtatgtgtgtttaaacttaggtcctatctccaagatattaggtatatgcaaatattacaaaatctaaagaaatccaaaatccaaaacacttccaatcccaagcattttggatatgggatactcaacctacatatcaatagttatagtaaatgggagtgaactaagcattccaattataggcagagatttcagacaggattatttaaaatatccaaccatagtttgtttaaaagagaaatgtattagagccaaaaccatataatttcaaagaaaaaagaggtactatgcaaattgtttacatataaaaaatgaagtgacaatactaatgtcagacaaaatagactttatgacaaaatatgtaacaagagaaaaagacatttttaattatataaggggtcaattaagcagaaaatataacaattataaacgtatataattaataggaaagtcccaaattctatgatgcagaaattgacagaattcaaaggagaactagacaattcaacaattattattggagacttcaaaccctactctcaatagctggcaggccaattagacagaaaaatagcaacaatatagaagaattcaccaacactatcaaccagcttgacctaactaacatttataggagacgccaccaaatgaaagcagaatacatattattttaaagtgcacatgaaattttctctgggatagattctatgctaggtcaaaaaacaaatctcaatacactcaacaggcttgaattcataaaaattatgttctcttaatatgtcagaattaaattggaattcaacagaaggaaatttggaagatatcaaaatattttgaaattcaacaacttctaaatccattggttaaaaactaaatcacataggaaattataaaatattttgaactgaataaaaataaaagcacaacatgtcaagatttataggatgtaactaaagcagtgcttacagggaaacttctagttttaaatacctattttagaaaagaataaaattcttaaatcattaactcaagctttcgccataagaaactagaaaaagaagaacacagtaagctcgaaggaagcataaggaaggaaataacgggggttagagcagaagtcaataaaatagaagaagaagaaagaaaaatcaatgaaaccatacattaatctttgaaaatattttttacatggagaagctttagctagactgaccaaaaaaaaaagaattaccaaaatcataaaggaaaaaggggtaattactaccaaccctacagaaattagaaagactagaatgtaataacatgaacaacattgtcaacaatttctgcaaaacatattaaatgaaaaaattcttagaaagacataaattaacaaaactgattcaagaaaaaaatagacatatgaatagacctaacacaaacacagaaactgaattagtaatttaaaattttccaacaaaaaaacccaggtccaggagaaagataggaatccgaggcatccacagtatagaagaagaaatgaaactctctttattcacagacaatacaatcctgtatgtagaaaaatctgatatccacaaaataactgctagatctgataagttcatgaagcttgcaagataatcaatatacaagaataaattacattcctgtgtactagcaataaaaaattgaaaatgatactaagaaaataatttcattctttgtagcataaaatagattaaatggtcataaatttgaaaatataagtactaaacctgtactctgaaaactgtaatacattgctgagagaaattaaaaatctaaataaatgggaccatattccatgttcatgaattggaagactcaatactgataaggtagtgattctccccaacttgttctatagatttaatgcaatctccatcgacatcttagcagatgttggcacaaattgaaaaattgcacaatcttggcacaaattgaaaaattgatcccacaatttatatatagcaattcaaatgtaccaaatagccaaaacaattgtgaaaaagaagaaaaaagttagaggactttgaaatcaggacattacctgatttcaaatcttgatgtaaatctgcaatgatgaagacagtgtggtactgtcataaggacaggcttatagatcacctgtaggtttaggaaacaaacctattcatatttttttcttaaatctactaactgcactcctaatgttgacaatggaagagactcgatagtccagcaataaactcttatatttatggtcaatcaatatatgacaaaggtgacaagataatccaatagaagaaaagcttattattgggtagcttattgttagtgtacagaaacagagctgattgttaatacaactcaacaggaaaaaggcaaataacttgatttttaaaatatttaaatatatatttctccaaagaagacatagaaatggccaacaggtatgtgaaaaggtgctcagcatcactagtcatcagggaaatgcaaatcaaaacctctgtgagatgaacactatcatctcacccctgttaggatggctactataaaaacaaaccaaaaacaagagataagaaatgttgttgaggatgtgaggaaatcggaacgctagtacaccataggtggtaatggaaaaatgatgcagctgctatagaacacagtagaaaggttcttgaaaaagttaaaaatagaactaccatatgatccagcaacctcactcctgggtatatatcccaaagaattaaaaccagaatctcaaaaagatatctgcactctcatcttctctgaagcattattcacagtagccaagatatcaatacagcatagctgtgcatggaagaatgcatggataaagaaaatgtggtgtattcatacagggaatattatttggccttaaaagggaaggacgtcctgccatatttgacaatatgtatgaacctggaaggcattatgctaagtgaaataagccagtcaccaaagggcaaatactgaatgattccatttatatgaggtgtctgagacagtcaaactcgtagaaccagagagtagaatgatagtaaccaggggctgggcgaagggggaactgggagttgctgttcaatgagtataaagtttcagttatataatgtaaataagttctaaagatctgctgtacaacatagtgcctgtactgtgcacttaaattattattaagaggatatgtcttaagtgttcctaccataagaagaagaagaagaaggagaaggagaaagtgaagaagaagaaagaaaaaatgaagggggcatgagcaaacttttggagttgatgcatatacttggttaccttgattatggggatggtttcatggttgtatgcttatatcccaattcatcacattgtatacagatgctcctcaccttaggatgggattgtgtcctgataaacccatcataaattgaaaatgttatgagtcaaaagtacattttcaattaatgatattttcaacttacagtgagtatatccagatataaccccatcctcagtccaggattatactaaatgtgtatcgcttttgcaccatggtgaacttcaaaattgtaagtcaaaccatcgtagtcagtcggggaagatctgtttgttaattatggacccatcgtgtacaccttaaatacttaataaagctgttaaatgaaaattaaaagttgactgggcacatggctcatgcctgtcatctcagtgctttgggaggccaaggcaagaggattgcttgaggccaggagttcaagaccagcttgggcacatagcaacattccatctctacataaaattaaaaatgtagccgactgtggtgatgcaagcctgtagtcctagatgctcgggaggctgagttgggagaatttcttgagcccaggagttggaggttacagtgagctataatcatgctaccacaccccaggagaccctgtctcaaaataaataaatagaagctttaaaaaatattggtatctcagtgttcctcattatccactgtatttaaggtttagctacttgtgcttgatgcttgacaaggtaatcttacttttctccctgatattggtatgatgcaaatttactatatatatgacacaaatttatatatgcaatattttctcgttaatggccttttattttactctcattttcattatgctttgccttttaagtcatatagcaaataaattatgtggcattttcttagcaactattaattcaggagaatgggaacagaattctctcatagattcagctggaaggtaatgatggtcagctcccagtggagaaaaaaaaaaaaactcccttcagttttcgtaaacatacagagaaattttctcctaagtgctatgtcagtctgctgtatgtcctattgatctgagaaccagaaaacacatattttagtttacactgccttgactctattgtacatggctaggtctgtttaaaaaagaaatccttgaagataccctttggattctagtattttaaaacggatgcttagctaagtgaagtggtctacttcaaggatcaaaaccaatcttgagtaatctgttaggtagactccctaagttcatctgtaccttgtaccaaatttttaatgaatttagtaattgacatggatgtaaaataaataatacactaataaagttcatgcagaatcaaattttaatgcccagaggtaatgtagaagatattacctgtccatttctctggacttagctcctgcaactctccatttttctctctaaactttagccacactgaattcctagtttcaattcctctgactcgctaagtatttcttctaccttgataaaagctaattcctttgtcttgtaccatctgtattccggctgatattgacatagttttcagggctcaatttcaatgttacttactcagagggactcactgttacaaccaccacagccttttcaatctaagtaagatccactgctcttcttagaaacaggttatattccaaatgactgtaagtgcttttgttcttagaacatatgtctccattcaaaagaccgatagatattcagttaagccctttgagaaaattataaatgttgaggaccttgattattattgttattattgcttcttttctatgttttcccaggactctcaacaaatttgctttgcttttgtactcatggcacataatgagattaataatgtttagaaaacatttcaaaaatacacacagaggagacacatcttagtctaaagttagacatgataccaaaaactataataactatagctgaccagtgaccccatttattcatggaaagtaaaatttgatgcatatttgcctttaggagcaacatacctatgaaagttctgaaagtgaaagtttgtaaaaaaggagtactctcctaacaatcttaatttttttctatatatatgtatggtttgcattaaactcttttgtatgattagtggtttaatgttgatgtcacccatgacaccataagctacgtgtatggactggctctgttttgttcactcctgaatatccagcaaaaatagtatagtgcctggcccttggtagatgtgtaataaatgtttggtgaatgcatagctacacttcaatgcttatcgcattttaatcccagctactcggaggctgaggcaggagaatcgtttgaacccaggaggtggaggttgctgtgagccaagatcgcgccactgcaccccagcctgggtgacagagcgagactccatctcaaaaaataaaaacaataaaaaaaaggagacccattcatgtatctgtatcactgactagcctgtcaacattttgttaactacctcatcaagtagcaaaatcagtacctggtatgtggtagatgctcaaatatttgttgataaaatacagtaagttaatgacaggcgagcttgcctcagtgaaatataatctgtaagtgagcagtgtgtatatcatttgaaggtgccctacttagcctagcatatcacagagattcccagtaaatatttaggcagttcattaactctaaaagttgaccctcatagtcattggcctacattattcacctccctctgtctctaataaattcattggcaaatttctgaactccaactggaatgtttgtggtggatttcttcatacctaatggattatttcaattttcattttacattgtattatttacttgtctgaggtctttataatgacaaactcggcatgcatgataagctgtcattacttatgccagttgacaaggacatattatttttctacaaaaaaaattatcttggccaggcgcggtgcctcacgcctgtaatcccagcactctgggaggccgaggcgggcggatcacgaggtcaagagatcgagaccatcctggtgaacatggtgaaaccctgtctctgttaaaaatacaaaaaaaaaaaaaaaaaagcagaacaaaacaaaacaaacaaacaggagtggtggcgggcgcctgtagtcccagctactcgggaggctgaagcagaagaattgctcgaacccgggaggcagaggttgcagtgagccgagatcgcaccactgcactccagccgggcgacagagtgagactccgtctcaaaaaaaaaaaaaaaagtggtaattgttcaaaatatttacttattaattcattttaaaattgcatgttgaaataaaaaataaatgtttagtttttaaactatctcttctacaacagaaacaatatagtgagaagagtgatcttgttttacatttttgcaaatctctttaaaagttagcttaagagaaggcagctggttcttatatctgtttctgcattgaatgtgctgtcatatctcgcatcatgtagcctctgaaaaactcataatagaatgagagaggaaaaagtcaaataacatcttagtattattacgaaaataatttggacctcacagaaccactgcatgggtctcagggactcccaggggtccccagaccacatttaaggaaatactgtttcagggaatataactatttttgtacctcctgtggctatattcttttaaagaatagtaacctctgtttctgaggaacttagctgcaattatgtgcagagtttaaataagtgaaacggaaataccctttgcctttctgctcgagtatgaaagtgatgatcaaaatgttcccttttctctctctctctctctctctctctctctctctctctctctctctctctcactctctggggaacttcgggtttccgtctctatataatgtattcatattccactggaaacatacatagtttgagaaaacagatgacattttttctgggggtggaaagaattactaccacgaggaattcaaaatacagacacagtaataaaaatcaccataaagcccagaggggaaaaaaattgagtaacaaaataggaggtgaaattataaaactgagtaacaaaaaagaggtgaaattataaaataaatgataaagttggttgtgggttaggaagaaagagaaatataaagaaactggcataatgtaaaagccaagacaagaaaagtgaggcagaggcataggtcttttgactattttccatgtttgattctaaggtaagtagatatagtttctcatagttggaaatgttcgtgaatttaaacagaattaatgtttataatcagatgcaatgtctagtttttctatttgtcctgtgaaataataattgtgtaaagtgctcatgattgtttcaaggggtgaggagtagttctaattatcatagatattttcatgacttcgcataccactggtttatagagattatacagattttcttatatcagaactctcgtatctttaattccctagtagatgtctaagaaggagatttatcacatagcagatggtggtaaacttgagtaaagtgccagatactaaatgcctttggctttgtgggccattcaatctttgctgcaactactcaactctgctattgtagcatgaaagtaaccatagacaatatgtaaatgaatgagtgtagctctgttccagtaaaactttatttacaaaaacaggtggtgagcacaacttggttcatgagccatagtttacaaacacttgctgtatagctttccctggttgaatttcgttaattttatacagaacctgcctcccatacacacacactttgttcttcatggaaaatctccccagactactatgaaataatgttattacttggagatatacaattaagatgatgtcattaggagattattaatataggaactaagcaaatactatatgctaagtactgaggatagggtgcgatcacaatagatagaaaatctgcaatagtttgatgaacatgggaaattacagtatttcctgtgatggaaacattatgaggggctgtgggactacataacaggacctgtgacctatacctgggttggggatgtctaattaatcaaggaaagctttgtagaggaagtgatgtctaacctgagattggaaaggtcaacctggagctacctagatgaagatgtatggaaggacatcccaggcagagggaacattgtatgatgaatcctgatatggatatagtgctggattttaaggaagagtaagttgttccatgaactatacagtgcaaagaaagatgaagaaatagaagtagagaccagatcacaaagggctttttgaccatgttagagaagttatattttatcccattggcactaggatgttgttgagtatatgaggacatgatcagcaacatattttagaaagatctcttattctgaagtgtaaagagtggataagaaggagacaaggtaggaggcacgagctaattagaaagcagtctcagagaggctgttagaaatcagaacagaatggctattattaaaaagtcaaaaaacaacagatgatggtgaggcttcagagaaaagggaatgcttatacactgtttatgggaatgtaaatgagtttaggcactgtggagagcagtttgaaaatttctcaaagaacttaaaagagagctgccattcaacccagcaatctcattacttggtatatatttaaaagaacacgaatctttctaccaaagagacacatgtactcacatgttcgtcgcagcactatacagtaacaaagacatggaatcaacctaggtgcccaccagtggtggattgaatgaaataaacgtggtatacatgcaccatggaatactacacagtcataaaaagcatacagtcacgccttttgtaggaacatggatgcagctggaggtcattatcctaagtgaattaatgcaggaacagaaaaccgaagatagttagaagctaaacattgggtactcattataaaggtgaaaacaatagacattggggactactagaagggggaggaaggagaggggcaagggttgaaaaactacctatcgggtactatgctcactacctgtgtgtggtgggatcatttttaccctaaaccttggcatcacacaacatactcaggtaacaaacctgtacgtatactacctggatcaaaaataaaagttgaaatcagaatgagaaggagcgaaggagacagcgacaggaggatggagagaagtgggcagattcaagagagatttctcaagtggacttatgaggacatgcttattgatacgctctgggagtgagggagagagaagaatcaaggatgacttctacactttcagcttaaaaaaccgggagctggtggagtcatccattgaacttgacagaggagcacgtttaggcaggaagatgatggtgtttgaatgtctgcgaagggaaaaactgaactgggattcaaatcagaaaaaacggtttgaagtcataccctcttaattgcattttctatcggatggtaatggctttgtgacaggctttactgataggtgatgtaactctgcctctgacagatgaagatccaaagcatcctcagattttcccgaagcctgtttcagcaactgtgtagacagcacacacaaaaatctggggggaagtcctagggctcagttagttgattggatctattaaagtagcattggagaacacagttcagtctgagatttcccaaacatattgctctataatttatttttacccagaaactgaattcgatgtgggatagggattataaaagccttcagattccagatagaatctctgaatagaaggcttttgggccacatctagtaatctcctttcctcactccatttctgaacttcttgttcacttcttcgctgtttttaggacgttcttactacactcctgcctcaaggcctttgtacttgttttctctgcttagggcgttctttcccgcaatatttgcatggcctcctccctcgcttctttatttctatattacctatctttattaaagctgctataaaaaaaaaaaagcccacacctcagtggcttaacataatagaaactttccgttcatgcaaactttacaaaaattttctggtcaacaagtagatttcctccaaatggtggatcaggggggcccagggcacttcgcttttgtggctctgatgtctttaacatacggatttcaaaatcactgtgctcttgtacataagaatgaaaaagaacaaggaatattacatatgtggtggtggttattggaggtggggttatgagccaggcttcatattcatgagcatcacttttgctcacactccattggctcgaactcagtcatgtagccaaactaatggcaagggagactgggaaatgacagctagctgcacaattaagagaaatgagtagacttgtctaatgagcagctagccagtccctaccacgaggactttgctcaaatgtctccttctccatggaaccttctatgatcaccctttataaaatcacaactgctccccatcttcccctcaatatttccatcccttttccatgcttcatttttttcctctgtaacacttactgtatcacaatctatagattttatttctttatcttgtttactgtctgcctccccttcctcccaatcggatgtaaggtccatgaggcagggattgctgccgatattcacggccatatcaatggacactagtagaccctcaataaatggctgttgcattgtgattacatatatgcttcacctagaagtagtctcatctggtggcacatttactcatagattgacattaattctctattgttttttccccagcaaaatttgtcaaggtagtttgtcagtagggagaaataaagttgtcaggtggctcatcaaaagttcaattttgagtactcctcctgtgtactcataatgttttataaatacttttatctatgtaagcacgtgggcttagacacaattctaggattaaaacagaaagctctgtatccatattttcccttttttgtacctccttttatgttctctaccattttttttgagtgctgttagtgaagcactaggctaaatcttgggtttctgcaaaaaaaactttaatcctcacaacactctaaaatgtttattgttctaattttaagacgaggaaactgagggctaaagagattaaggaactcgcccgtgttcacgtactcagctgataactggcagcatttagatttggacttactttccatacagatattcgcattgctaaccttcaggtttttccctcatcgttttccacatctactcaaaagttgctaatcatttccttaatagtgaggcataaatgactgagaaatcttgatatattatccccctcaggagcacttcattccgacaagacacaaactttagggaaaatgaacaaatgtctacttgtacaactcaagcaccaaccaggtatggtagacatgttggcttaaaaataaagttgatgcttgggttctgattctgataatgacctacggagggtatggcctgaggaggttactaggtgtgtgtagaaatcaatgttttgttttggttttccctcgggaagggtcaacttatacttgaatccttctgaagtttctcaaattacaagatggtcatttattttacttcaatcaaaacaacaaagtactgtccgggaaagatgtattgccttgacttattctcaatttatgcttattttggaggcttgtagaagtaaacctgatagaggagggcaaaaacacacacacacagacacacacacactgggagaaaataaatttaacacagtttagggattgactttggttgtatgacatcacaattgcaagagttggatgccattgtaaacaagctatggaaagaatactgttaaaagtaactcattaagtggttacatggtgtagctcatggacatatggcacagaaaaaagataaagctgtctttacataacataaaactgtattctgttatgtaaatgtgtgcttgtggcttgcagtaaaattcctagtgaaacattacctctagattcagcagtactatacctcaggccacatggatgtaagtaaagatgatgccctctggaaaactgagttaggcaacaacaagtgcatccatgaggatgcaaatttcaatgttgaaggtgcctgtgaagaatttgaacaaaattgttgcatgaaatatgaatgaagaagtgtgatctaatgacataatattttgtactatataattttaaagtagtacacacaatcaaattaatgaattaaacattatatgtaaacaggtgatcattgtatctccattttctaaagtttctatgttaaaggtgatcaaaaaacttggagagagggacttctcatttggaaaatgggatagtcacctttgggtatgtgatgtatcaatctctagaacttcagtttcttcattgaaagcatataaaaggcaatccaaaggatgtatggaatattaaaagattccactgtgaaactatctagcactttacctgaaacacttgttagatcccctcaccaaaatcatgccatgtgatttggcagtctattcctcttagcgtaagagtagcccgacagaaaatgttcattaagagttaatgttaaattcattgaatttagcaacacatgagtagcgcttcctttctgattatgcaaatctctcaccatcgtaatacgtgcttcctttaatttcattgggaacatttgtaatgtaaatggtaacagagccaatatttcaaacagaagccattctttctaaaaaaagctaaatgtctaaatgtattgaaatgcttctaaaagtaaaatatttagcacttatttgcagatgggtaatgttaaatatctcactcattattattactaccacttgtctgaataaatcctcccataagcattaagcaagtaggtaaacaaagaaataacacttcatgtgatgaatgccaatatgaagcacgtttaaactgttctgtcaagagacaagcctggaaatgctaactgtgtttctttgcttttctgcaatcatctgaatacataaattcaaattgcagcttttaaaacttcaaatcgaggcttttgaaatttcagaaaacacatgcgcttggaaaagcagattataacaaggtcccaacgggattttgtcaccatcttttttatatttcaaagtataaaaaaaatctagataagaaatgactaccaaatgttttcatatttaaaagatgctgtttttttaaaaaattaaatcactggaaaaaaagttttccacaaatatcgtgtaaaaagaaagacagcaaaaagcttagccaaagcttttactgtttaagtgatgatttattctgagagttcttaagagttttctaaattagtatatggttaatatccataaaatcatatgcaagatgctgtctttcaaattgatgctgaaggttaattataaaatgtacttaattatttatagtgtcccattgagtcccagatactctgtgtccaagaacactgtaaatacagaaagtttagcagaattatattggaaaggcagtaattcttcacaaattaacttattgatataatgcaatcccatttaaaaattttcagcgagaattgttttataatttgactgaatgatacattacataagttagaataactaaagtgggagagcgggttaacctaccagaaattaaacatattttaaagctgcaataattgacatagtgcattactgtcacaaaaatctacagtagatcaacaagcagaaacttaaaatatcatgaagaaagcaccataaatcaattcagaagagatggtgctgggggaaaaaatatcagtttctgaaaaactcttcaaggttagaaacaacactatataaatttaagatggattaaatatttggttgttcttttttaacaaatgaaagagtaaaggatcaagaataaatgagaatatctgaacaatggtaaaatggccacaattttaaggatactatcaatgaacataatatcaaagaaataaactgttaaattttatttagaaaaaactactaaaaggcaaaaaggaagctggaaacgtagtctcaattaatctatgtttcagataatgtgaaaagagctcttaaaaataggaaaacacaggaaaaatgggcaacagacattgccgataattgacagtggaaactaaataaatgacaaacatgtacacacatacaacattttcaactttcctattagtagaatacttaaaatatctatggcaagctttttatttgttttattggtatatcaattataatgctcaatagtggcaaaagtgtagtgagacaagtattttgtaactgttggtgggagtttacgagtgttctgagtaccaaccttgacagaaattcaacaatgtgtatctaaatccttaggattcccattgttaacttttcattctcattccagcagatacatgattcaaaatgtataaataaatgtgtttattgtagggttattcattataataaaaaatgaaagcaaacaaaattcctaataacacaataatggtgaaatatagggtacccctatatatcttattactaggatcttaaaaaatcaagtttttaaagcgtaattaatgacctacagagacacatagtagaataataaatgaagaaaataagcatacaatatagggtttgaacccagtaatacatataaatctcaactatgatgaataagcacaacatctctcctctgtactggatattcttgatagaaaaaaatatgctagtaaataatttgagacatatttgaaaagaggggagtgtttgatttagaattttctaaacttgagggttattattatttttttggtttgatattactttttcctgctccttaaatttttgtttgtttggggggtttggggttttcttttccttaaacgtgtctgcttctagatgaaagttgaaaatgtttaaaagccttgccaatgtgtctaggtttttcaaatgtaatcagattttagcaagattttacttaactaaaagtattcagaacactgtgcaaaatcatctggagtcaaatagtaatggaggcaatgatttgcagagtagaaacagagagagagaaaaagatgagatagaccctcaaaatctagacccaaggaattaaatctgcttggaacatttaaacaaataaaggatgcctgtactatactagacgttttcttcttccacaattgattctaaggtcagaatctgaggggaaatggtgctgttccacattctaaaacaaactgccagcaatcgagaccagccacttccccatagggtttactctaaagcaacagggattattatctctattccaagcaatttccaatctcctctgtactccgtgtcccaggcaagattaaaaagactcaggtaggaaggggtagtaagctttgtggggagtgcagtttgtggtaagggacagttccttctctttcatctctctgagtcagaagtagagacttcgagagaatcactgagagtaagtatgtagactccaagaaggaaaaagcatcctctcacttcaatgaatgtttggaatctgcagacctccttcccaggtctgtgtagcttttggagaggccagaagagcaccgtaggcattcctttggctttccatggccaagcacatagagtagaagaagaggaggaaccgtaaggttaaccatacataagaaatcaacaaaaggctttgaaattgacttttcctatttttcaatttaaataagagagaattgtcaatgattaaaattcataaaacgaagaaagaatggactcagaaaatagcaaacatgaaatgttaattattagttcaaaagttagtttaccgtgttttctctgccaactgattgctaatgactaaagtccttatttccagctttcctctctccccgagctccagatctcttgatttattaaactagtagtttccccaaaatatatgagacaacaaaatatactctcagctgaagtaaatagcattcatcttcccagtcagataaggcagaagtacttctagatcagatgttatattcgggataggttaaaaacagaccctgctcccagtgtcccaggaatgaacagtggatgtgcttatttctcattgcatgcgtgtatcaaaatatctcacgtaccctacaagtacatacacttactatgtccctacaaaaattaaaaacaataaatcataaacatttgtaaaaataagcgaataaatgtataaatgaatttaaaagagaatagacagaggggagaatgtaactttacgtgtcccagaacagactttgaacaggctcttatcatataggaaaactgaatgaatatatgcaagcataagtccaataaccagattctgatttacagaatgatcgcaactgtagttctctcaaggccctgtctttgaacaggctgtgtcttattcctgcaacatgctgatctatcttcatgcttcaagactcagatcattatcttctctgggatgtctcccaagcactgccccagaaataacttctcctcctataatacttaatcataatccttggcttacatgcttgtttcttctcattgactatgaaatcctcaagacaaggtatataacgtatatatctttaatcctaatgcccaattgagctcttagaaggtagtaagctcccaatacacatttgttaatttgaagcaaaaaaaaaaaaatagctaatcattcaaaaaactgaattatcacaaatgtccatctaaagtactatatttacacaattaaatgctatacagccaggttaatgaacagactaaaattatatgcaacatggattatcgtaaacataattttgaatgaaaaaggcgagacacaaaggagtataaagccatacaattccattttcataatattcagtaccggcaaaataatcaaagttgacagggtactggttatacttggaggcagtgactgcaaagggataagaggagatttctgagattctgataatattctatttccttctctggttgtacagtgtgttcaatttttaaaacactattgggctatacagttaaattgtgcagtgtcctgtacgtatattacacttcagttaaaagcttccatggaagctacacatagttcccaaaagacaacaaaacaaaaaattttcaattattttaagcacaaacaattttgttcagctgtcttacaatcgaatatgtaagaataaatttatggctaattagcatagagttatatgcattttcataattaaaacttccacgagtacaacatatgttaagtattttaaatcagtttttctctttcctcaaataaggttgtgagtcataattcggaaaacagtttagcatgtaataatttagtgttttattttaaaccaagctgaagccacataaagcagaactgctcaactgagccctatccaaatccttgacccacagaataagaagcagataaaatggctgctacttaaacaaaacaaaaaccttgtttatatttttgtcctctcattttccataagtatactttaattaaacattttaaaacttgtaactttaggttatatacttactttagttggttctcaaccagggacaattttgtccccacccccaaccccccagcatatttggcagtgccttgaaacatatttggttgtcacagctcaggggcgaggtgttactactggtatccagtgtgttcaacaggccagggatactgctaaataccctacaatgcagaggatagctgctcacagcaaagaattttccaaacctaaatgttagtaatgctaaagttgagaaaccttgctcagatataatgacataatgttgttagaatttttattttattcattttaatgtatgtatgtatgtatgtatgtacgtacgtatgtatgtatgtatttgagatggagtctttctctgttgcccggggtggagtgcagtggcacgatctcggcttactgcagcctctgccttccacgttcaagtgattctcctgcctcagcctccctagtagctgggattacaggcgcctgccaccaaacctggcaaatttttgtatttttagtgtagacggggtttcaccatatttgccaggctggtcgcaaactcctgacctcaagtgatccgcccacatcggcctccctaagcgctagggttacaggcatgagccactgcgcctggccaggaatttttgaatcagaatttttcttgttcgattttaatctcttatcatttagagattcttgaaatattgaaattactttgttcaaagtgaatgaattttcttaaattatgtatggttaacatcttttaaattgcttatttttaaattgccatgtttgtgtcccagtttgcattaacaaatagtttgagaactatgttggaaaaaaaaataacaattttattcttctttctccaggctagaagaacaaaagaatatcttgtcagaatttcaaagagatttaaatgaatttgttttatggttggaggaagcagataacattgctagtatcccacttgaacctggaaaagagcagcaactaaaagaaaagcttgagcaagtcaaggtaattttattttctcaaatcccccagggcctgcttgcataaagaagtatatgaatctattttttaattcaatcattggttttctgcccattaggttattcatagttccttgctaaagtgtttttctcacaactttatttcttcttaaccctgcagttctgaaccagtgcacataagaacatatgtatatatgtgtgtgtgtgtatttatatatacacacacacatattgcatctatacatctacacatatagatgtatagattcaatatgtctaaatgtatataattcacagtttttatctttgatttgaaattaattttagattttacttgagaacttcacaacttcatataattttaaaaactgaagaccagattgtggaatcataaaatctaaatctaaatgggaatcacttttttaatctgtcctggttacctacctggagatttgagaagagtctttaaaaagaagaatccattttcttagggaagatctggattgccagatcagtctcaccacttcagcctctacttaaaggcattatattcccccgaagcaatgttttgttttagctgatttgtctgggggtgtgggacgtggtgttggttcacattccatttggttgaatagacatccagcttattccagtggcttttcataccgtcctactgtgatgtctgcttattactgattacttcccttggctgactgacatgctctgattgtgcaattggattaactttcatggttttagttttaggaaagcagctcttttggatctatttcattttagttgtcaagcagaaggtgaaaggggaagagaaattaatatttaatcattccctgttatgtgccaagtattagatacatttacagccactattttatttaatcttcatatcagattttgacaatggttgctattatcctcattttacacggtcacataatcaaagggaaatgaaattggtcctttatcaatgattcaggtgctttacacatgtaaattagagtccaatgtcaaacgtttatttctgtgaaacaagaggtttacacctgaacaagaaataaagtataaaaataaaatatggcgtaattcaataaacaaatatggagcactgactatacatccgatgttttactaggtatttgggattcaaaaatagaaaagagtgggaatcatttgaagatggttataccctagaacaatgaactcagtcttttcttggaaatttatctttcccaaatgtattgagtgtcatatatagtaatataattgataattcattcgaaacatatttagtggcattttcttattaattaatatgcatgagtctattttctcctgaaagaatctagatcagtgctttcaaatagaactcccgtgatgatgaaaatattctgcatcatccatttttgtaacgactagctatttgtgccttttgaatacctggagagttggtcgtgtgactgaggaacttgagattttattttagtgaattttgattaacttgaatgttaatagcgttgtatggctaatgggtactgtagcagacacagtaactttagttgacaaaaatgaagtgttaacaccatggtgattttggaggtcttgggaaagggcatacactatgtggtggtgaatgagttcgagaaatttagggatatgaagtaaaaaatgaggactccagaatgaaactacccaaatttgaaccacacctttgttgcttgctagatttgtgtcctgggagctggtatttaacccctttgtctcagtttccttccatataaaatgaagataattggatctacctgatataattattataatatgaagataaactaagataataaatgtgaaaaggttagcacagtgcctggcactgtgtatattgagagtcaatactctcaatgtcagttacctcttaagatgataatgcaatttctcagcagcaagctacggtatgctatggcatgctatgatacccaagaggctgatgaatttgttcacattgttctatttctgatagagagataggttttcagacactaactttatttggagtgttgctttaccatctcacatttttctcttaaaaaatttatgagggataatataatcgtttattttctacagagatttatctactgagggggtgagtgtttcagtcaatcagctctgtgctcagatagaaaactgttggtatttgaggtaccactgggccctcggtcaagtcgcttcattttgatagactaatcaatagaagcaaagacaaggtagttggaattgtgctgtaattcattttaaacgttgttgcatttgtctgtttcagttactggtggaagagttgcccctgcgccagggaattctcaaacaattaaatgaaactggaggacccgtgcttgtaagtgctcccataagcccagaagagcaagataaacttgaaaataagctcaagcagacaaatctccagtggataaaggttagacattaaccatctcttccgtcacatgtgttaaatgttgcaagtatttgtatgtattttgtttcctgggtgcttcattggtcggggaggaggctggtatgtggattgttgttttgttttgtttttttaacctgaccgtttgctttggctatatgttttgttgtggctagaaaaaatgatgatggtgaatggctttacattaatgaccaaatgccaaaatttataccacaattttttgcataaattattctgaagaatcagactgaagaaatggcgaagtatttaattcagtggccaggcatgtactgacagtatttaagctgaaaggacgtggtctggttctagttaaacaagtgtcataaatcaaaattaattattcacacctgtggtatggacttaataattaatgtacactaacgttcgccacaagtttatttatttacttacctactgatttattaacttgtgagttttcatctttccaccttgcatactatataaatctaacagtaatactatttattaaattaatacatatttattttatataaagcaagtggtacatatgaatttatagtaaaaagcaacatcaattgatccagcactattcattcaaagacaatcatttccccactgtattttcatggcatctttgtcataaatcaagagaacttgtatgtatgaatctgcttctggattctgtatcctcttccatttgattaaatctgtactttaacaacagtacttcactggcttaattacaatcttttttttaaaacaatcctaccgagctataattcacataccattaaactcatttaaagtgaacaattcaatcgtatttcggtgttacttttttaaggtgtgataaaatatataacataaaaaattgtcattttagtcatttcgtgtgtccagctcagtggcatttattacaaccatcaccacagtttatgccccacccccaatttttttttttcttttttggagacagagtctcgctgtgtcgctcaggctggagtgcagtggcgcgatctcggctcactgcaacttccgcctcccaggttcaagtggttctcctgcctcagcctccctagtagctgggattacaggcacctgccagcatgcccagctaagtttttgtatttttagtagagatggggttttgccatgttggccaggctggtctcaaactcctgacctcaggtgatccgcccaccttggactcccaaagtcctgggattacagcgtgagccaccgcgcccagcctccaaaattttttattactccaaccagacagtctgtaaccattaagcaatagttcccctttctctctcttcccatccgctagtagcctctggactactttctgtttctatgaatttggctattctagatcttttatataattggaattatatatttgccactttgtgtctgccttacttccctcagcataatattttcaaggttcatctatgttgtagcatgtgtcagaacttcattcctttttatgactgaataatattccattgtatgtatatacgcaatcattttatttaaacattttggatctggttgtgtaaaccttccactttgttcttcctattcaagattgccttggctacttttggttctttgaataaattttagaactatattgtctatttttacataaagccttccaggatattgattgaaattttgtgaatctggagctcagtcaacatctttacgatactgagtcatctaatttgtgaacattttgaattgtgtcaggttatttattgtattttttaaattggtgatgctgacattctaataacagatcatttacacgactgataaaatatttaggaactaaaataagtaccaattttatgacattaaaaccataatgtgcgcttaagtgtctctatttcaagcaggtagttatttgaaaaaaaaaaatcccttcttggtttctacctttaatgattgcaaaacatctgtgtaaagatacagacttttatgtatggagggaaggtggtgtcccagcaattaaattttatagctacataacaatacaaatgaaatcatccctcataaaaagagaacaaggaggaaggatacccaaaatgttctacaatatctcagtacatcttatgacaaaaagaagaacaaaaattataattgtaggaaatgtgagagaactatctaaaatatacaatagcagctttgtgggttgtgaaagagtcaaggttttatgtgtcctgcaacagaataaaaagtcaaatttttatgatagaaaattaaaactgaggttacgaacaccatcatgtatagacttatattactacagcatccataatatctgtttcctatgccaaaattataattttaatgcaatgtctttgccattaaatgccacaggatttggaattttattcattagtcatattaaaattatttaatcatcttttctccatccatatgcctctgtatccctgttagtttagatttagggatagaaagcaaatgatcagtaccagatttaggtaaataacacaagtttttttaaaagtaaaagaaaatggcttataacactggcagacagtcttgatcttcattaaatctcaagctcttacttattacaggagggtagaaataaagcggaccccctccctgtgtcctccagccctacccttcatccaaaggttagagtgggtgatataattggaactagtgggtcatagttactgtgacatgaatatgtcaattccttagtacatagtatctccaaacatatcctaatatcataatcagttggcaggtgactttctccacagctaactctaatatgctgcattctgcgtattgagccaactgaccccttactcttgtacctttattttatttttttttttatttattttttgagacagagtctcgctttgtcatccaggctgcagtgcagtggcacgatctcagctcactgcaacctccacctcccgggttcaagtgattcttctgcctcagcctctcgagtagctgggactacaggcgcgcaccaccacacccaactaatttttgtatttttagtagagatggagggttcgccatgtcggccaggctggtctcgaactcctgacctcatgatctgctcacctcagcctccgaaagtgcggggattacaggtgtgagccaccgcgcccggcctgtacatttatatttcattactgaagagagaaaacagcaggtgaagataatatagctatttctttaagggagtggtggacagggttgctttaaactgaatatagccattagcgtaaatttatgggtagcttcatgcaatgaaggctcatgaaatgatatcctcattcttgtctaatacataacttgaccttttacagcctttaacaatgatacccgtaagagccacaaagtggggatgttattaaagctagcctctgtgttcctctctctgatcatctcattctatgatcttcacccacacttctgactcaggtgtttttaatatttatccctcttcatatttctttgtattttctctgaacatgcatgtgggtgtaggaggctctctcgccatcatcatcactctcttcctctgtgtttctcacttttaggctaattttcatctatgaattgacacgtatattataggaatttatttttatatatttattaggaatcttctttttgttttttttttttttttgagacagagttttgctctgtcgcccaggctggagtgcaatggcacgatctccactcactgcaacctctgtctcctgggttcaagcgattctcctgcctcagcttcccgagtagctgggattacaggcatgcaccaccacgcctggctaatttttgtattttaagtagagacggggtttcaccacgttgatcaggctggtcttaaactcccgacctcaggtgatctgcccacctcggcctcccaaattgctgatattacaggcgtgagccaccgcacctggccatgaatctacttttctatttgcatatttgccactctttttctgccccagttgtttatgtaacacattctcttctgctctccttccctgaccccgttaatcccagtttcatctctttcatgtctttttattttgtgtcccctttcctcattcttcattgctctttgtatatgttatatgtgggtatttttttaactacccatttatttaaaaccaaaatatgctttatcattctttatttttgaacaccgagtcctagaaaggttatgtgacttatttgagaccatgtagctttctatttaaatataaaagtgattccaaaataaacagtaggggttttaaccttttggtgaagctcaagtgatttttatgtggataatatcctaatattaaaatggggatttattttcttttaaaaaaactatatgagtttttgctttggtttttgccctttttgagaactagatgctgtgttttaaaattactttctagaaccttctctgctgtggaacatttacagttgtgtaatatagcaaaacatgtttatgttgtttcagaattagttaaaatcctactatttttaatgtcaagtaattttacaggtggtgtacgttatgcattcctattagttttaataaatatgttgtcattttgttaaataagtttaaatttttcatcgcattttacatgtaaacagtaatttactatctacacataaaataccatttacaaataagatatactgtttatatgtaaatggtaaattactatttgaatttgttactgcccagacagtataaaatggtgcacataaagaaaaaagcattttggaaaacaattaagaaatttggctggaaagtgaattttagttaagtgcatcttattcactttaccgaggaaaaaggtaggtttacaaatacaacatatataacaaacctttaatatgggaataatttttgtaatattgataataatacaggtattattttcaaaaaatcaccaaataaaaattatgaaagtaaaaatacagtgcaactcctagcacaaactatcttccacaatatacagttggctgtatctaaatttccagaaatctggttcattttgtattaatctctaatcatgttgcttctaaatatgtatctgaggagtaaacatttcagatttattttcatttgtataaggtaaatgaatgtttagtctttttccagacgtatttgctatgtaatgacagtcattattagtcgtcagtataaatgtgaatagcaaaaaggagaaaattaaataaagctagagcttggctttccgactccttgctcaaaaatggacactttgtccaatcaatttcctatcacaagatgacgattaatagattgttctaatagttaccattcagtcctgcccttaacgtgatgttttttcaaccaaataatagaatcttcactggcattgttaccatattgactggtatttatggaaccccggaaaaaaaaatgctgtaaaatatatagtaggaagtataataatcattataggaaatcatttctctagctggaagtcttagcagggaccagatagttccactggagcttttatgtgctcatgattttctcccttgaagtgtatttgtaacacagttcacacagtttttaattttataaatctgtgtgctaaaacgctattatataagaaaacgggccgggtgtggtggctcacgcctgtaatcccagcactttgggaggcccaggcgggcagatcacaaggtcaggagatcgagaccatcccagccaacatggcaaaactccgtctctattaaaaatacaaaaattagctgagcgtggtggcatgtgtctgtaatcccagctatttgggaggctgaggcaggagaatcacttgaaccagggagtaggaggttgcagtgagccaagatcatgccgctatactccagcctggcgacagagcaagactctatctcaaaaaaaaaaaaaaaaaaaaaagggtgttcacctatttattgggcatatagtctgatagttcccagaaacccattatcttgaatgttttctttatgtaagttcctggaaatccattatttggatgttttctttatgtagttaataattacagcaaagctgtaattaaattatttattcaagagctatctattaaaggactactatgtgccacattctgttctaagcatatcataatcacttcccacccttcccttatttaaaggacatgcataattttatagggcttggcattataaatattcatatctctaatttatagttgctaaacagtttgaagctgagggttgggggaagggagtagtaatttaaagtttataacataagcatccttgactttgcctcctataatttcacactgacatgaggtttattactaggttgtgtgtcatgagtacatctcaatttgctctgactgttctggtttttgcctgttatcctatcataatttttaatagctccctctttcattgtcataagtattccactttagaagataaaatatatagagagggtcactctagttatgagaacaaacatcaggcttttagagctaggcttggtccagtgctcaataactattattatcatgattgcttttgttcttagtagcatcatcgtccttgtcatcatcatctaccttcctaatactttagttcagctgagaatttcggcctatccaagaaatctgattgccattattaccgaattaatcactctttaatgacaatagtatataagaatacgtgacatttaactttccaaattattgaaatgttacgctgtgtatggaaaattctttctaaccgtgttttttctctactctcaaatcgtaacaatcgtcaacacagaagaagacttttatgaccaaatttgtggaatttttttccccatacaccaaacagcaggcaccagctgggtgtctctaattcagtcctgacactatccacccagagatagtgtcagatcccatagattgagggctcagtaccgaggtctgcctcctctgcacccccctagcgcacgcgcgcgcacacacacacacacacacacacacacacaccagtctcaagtccaggcctctggaacttctgacccatgggcttcaagttggggttcccatgaccctctctttgggttcaactaacttgctggagcagctcacagaactcaggaaaacactcgctttcacctgtttatgataaaggatattgcaaaggacacagatgaagagatgcatagggtgaggtatggttggggtggagggacggaaaggggcatggagcttccatgccctccctgagtgcaccaccctctaggaatccccacctgttcagctacccggaagctcactggactctgtcctctttgttttttatggaagcttcatgacatcagcattccttccccaagggtatatggtgggaccctctaacaggaggtttttaagacctataatctgaaaggcgagggaacattaaagtgaaaggagagcaggagaaggtcagaggcctgcccctgagacccaacgcaaccaacattataacaaaaaactgtaacaagggctatgggtgttatgagccaggaacctggatagaaaccagtatgtactataataccatataggcaatgccaagaatatggatcagacactttacaaacaaggaaaaagtaaacaggagtgatgaggaggtaatttactgcaggcattaatgatgagattatgaattatggattccacttgctaccagctatgtgatcttatacctactctgtccatacctaagttataacatccataaaattcaaatactaaaagaagacacttccccaggttgtggtgaaaattcaatgaggtagtaaatgggaaatgtgtaacacagtatctggcatattgtaattgctcaaaaaatgttagattaaaaacagtaggagtaatactaaaatagaaaaatgcaaagagcaagcacaaaatcatctctgattctcacctccaaattctccaaaagtctcaccttcttaatcaaagttgtaaatatggctcttggggagaaagctgaactatgtgctactattatgaatgcaacaggtgaaggagaggagagttagaggcagcaagacaaccaaatggctctcgtggaaggcacagaggattttcagccactgctctcctattccgctgatattactttcattttctatgaccaactagcatttcagctaaaatgtgttggaaaatgatagatttttctcctcctattgcctaagaagcccaacaaagccagcattgttttcaaacaccagcattctcacttttaaagtatgaacataattcagaggacttttaattctgaacatcgtttttatcaatctattggcctgattgtaacccagaaatccaagcagaaagcaagtaaactttcacactgcttccccatcccttccccctacctttatttttgacatcagtttccctcattttggcaaagtaaaggaaaagcatttgtagaaggttacactgaagctagataattttctattaggaaacctcaccaaatacaagataatttgttcattccaatataataatgttttaaaaaatataacaaaaatccagcataaattgtgaagcactgatacttgtgtaacaactaatttccatagtgaaacttcattgttgccactatctacatactgaaaatgtatatcaagcatgtaaatgtgtcacttaagtatgctgtgccctagattttatttaaaagttaagctaattttcaactaaaaacaaattcgactattcttagcaatctctcctccccgttcatgatggatttaaaatgatgaagagtataaatgatgatgaaaagagaaaggaggagaaaaatttcataactctgcatcttcagtgtagcatttttaagtaactcctttattagcacaaaggtgtttgcctgaagcaatgacttctagaaaggagaagaaatgacataataaaaggggattttgctaatataaaatgttttttctttccttttgtttctgcaatgcttttacttacatagcaccaaccctgagactagagggagtttccttcctttctaataatttaataatcgtgaaatgatattaaatggaagttttcatatgccaactccttaaactgaggttaaataaggaacaaagattaaaggccatatttaagaccacatattgtaaattctaacccagtttcatttattatatcacctgcaaagccaatatgccatacaaaagtaaaataacagggtgatttttattaaagatcagaatcataccaaaaatgaacttttctgtcaaatctttatactcatacatcaagatgtgagtttatttatgtagctaaaataacttaatactaaatgctgactactatattcatgtcagctgacccctagtgcttcaaaccatagaaaagggataccaaatgctgggttggttgtgtattccatttttgccgtataccacctgccaaggcttataacagatctgtaatgggtttcttaccttttattgtgtagaaaatggattgttggattaggcctggggccagtgaaccatggaaccccaggtttgcaagaaagagtttatcaccctttgatgttatttctgtctcgtgtcagctgagaaggatgagctagattatctgaaagtaagctggatgccaaaatcagcattcccctcatttatccaccttatggttcggggcaagaccactgtatgggtaacaaaagggctgataagggcctgatggagaaatttggtttttctcccttttgattggcttgctgatattagaaccaattacaagacattgacgagagcatttcattgtttgttgctagagaaaatccatcaattttgttgtggaaatgaaagcatttgagctgaatgttgcacttataatttgtgaacattttcagttatcaccgggacaagtatagtccatctttggcatggttggccaagtgtggtgggaaaagagatggaccagcaaatgggccggaaaccaaagtcatcaaaagggtatttcaagaaaactctatttgttctgatggttacattctgcaggcaacctgtgactgatgactgatgcttatacctcaaatgcagtctaaaaatatttttttgtgaaagtgacacattctgactgtgatgtgggtgacatcaacagttttgaataggacagtacttcttggacttattgaaacttttataaaagaatgaacattctgaactcaattgcaatgtaaatgactatcatgaagattgcttctgttggtgctatgacttttgtgacaaattttagaccattgcagttatctcctagaggttgctttattgttttattttcatcagtgatgtgtattttatcagtgatgttagaatcactgagctgctggttaaggaagagaaaaaaattaatattcaggtgctatataggcccttattcattgagaacaaataaaggccaacacacaaaacaggaaaattaatagaaaagacactctatgggtaagatttcatatagtttgggagcagacaaaaactattttaattactaaaataattaagaaagatgttgaggctgggcacggtggctcacgcctgtaatcccagcactttgggaggccaaggagggcaggccacttgaggtcagagttcaagaccagcctggccaacattgtcaaaccctgtctctactaaaaatacaaaaattagctgggcgtggtggcacatgacttgaatcacagctacttgggaggctgaggcaggagaatcatttgaacccaggaggcggaggttgcagtgaaaggagatcacgccactgcattccagcctgggcaaccgagtgagactctgtctcaaacaaacaaaaaaaaaaagattaaaaaaaaagatgttgacattaacatgttcaagtctttatgctgaaactagaatgcagtatgattaaataatcatttctacttcgggtgaaggattagttttcttaaagatacccctttccagcttctcagttcgcgtgtggttaattcccaacgtggcctcaaatattctaatggtttgtgtaatgagtgccaccgttccaccttcttattctccatgcctcatctcagtcctggaaagatcactaaacttgcagttcataactcagtctagacccaggttcaacactcactaactcataactgtgggccacttatttaaatctcttagtgcctctagttcctcatttgtccaacagtgatgcattatgaagcatgtttgcccatctcccagcgtctagtgaggaactaaaaacacaatatatactatcatactttattacgaggagttaaattgtggttactattacaaagtaggttaccataaaattctaatagcagtggtaaggggtaaagatccacgtgccatcacgtagagcagaacttctcaaactttaatgtacggcaggtccttgaataatgttgtttcattgagcatcactgtgttataatattggcaagggaaaaaactgtatctcagctaggggggcactgtctatgtggggttttcttttgtctctgtgggttttcttctagtactctggtttcctcacatgtcccaaactgtgcacgttaggggaattggtgtgtctacattgtccccatgtgagtgtttatgtgtctacgactgtgccctgcgatagaatggcatccctgccagtgttggctcctgtctggtgctctgagttgccaggatgggctctggcctcccaagtccctgaactggaatacgtggcttggaaaatgaatgactgaattaatataaattactgtgaaataaaaattcatatagtattcaataatcataaagatgcgtgacaataattgatgctctacagaagtgctcagtgagctgccatattgattattgtttgtttttgaactttgtggtgagagaaggcaatcctggcagtttatgctttgcaaacatttattccttgaatgaaccaccgccactgcaaacactgtcactcactgattcaccaaaaactgggtaaataattttcctcctggtttttattaatctttctaaagtggatgtatatctcacatttatttctgagtttaatattagaagtgcttggggtctttatttagatgttggatcatgttttgtgaacacaggtatgcagtaggaacttaattcttgtttatcaattagcctatggtaagattggtttcattatatgtcattttgcctaagtcacagtttcccagaatctatcaacaacattaattgatgacttactgaaacaggaatcaccttgagatcttgttaaaatcaggttactgattcaatggctcttgcataggacctgaggttctgcatttccccccctaatttcaagatgctggttccctggtccccttgctctacttcttaaatggtagggaggtagagagtggctatcaagagtctgtgtaggagttgaccaccaatcccattcaatggaatgcatacagtgtgttctgagatactggaaaggcctttgcaaaaagattttgtctcttgatatttatgaagcacattcatccgaccacagaagatacatatcaactttgacagaaaatatgaacacattcaaatgatttatacctttgaaacatagatcgttgtggggttcataacccaagtataactttcccacagattcactcaatttccttcctctttctgtgcaatatattgtatattgcaagaagctcacctccactcaccttattcctcaggctttcttctcaactatcttctgtatagatttaaccagtgggaggcgttggcaggagattggagagcaggagaaggggagatttcagggtatttctttccctctttcactgctttgggcaacagctgatacagagtaagtggccaaaaaatactagctattattaggtcttctaataatgatcttctaaaatcactttttcagtggttacccccattgatttgccatgaatgtctcttcagacatctttgcaaagaattgagcctgactttagatactcattcaaaatcaaaatcagtaattttaggattgaggactctggtattatttaagaactcttaactgtaccaagcctcactcccatttctggctttcccctatatatcagttaagtaataactccaatagtgtaaaatttgcaatagtgttatgtaacaaatcaccctaaaacttattgacttaaaattatcaccatttataattgcacacagtctgtggggtcccgtgagctgttgtgttgttctggctcactcatacattttcagtcagctaatgggtgggctaggggctggcttatctagcataagcgcagctaggatgattcacctctgctccatatggtctctcatccttcggcaagcgctcctgggcttattctcatgcaagaaacaggattctaatagagaaggaaacaagacttcttgaagcttaagcttggagctggctcactcatttctaacacatttttttaaccaaagcaaatcacaaggcaggcccatattcagggattagggaaataggttacaactcctgatggtagcaactttaaaagtcacattgcaaaaagatgtgcatacagagaggtcaccagtgcaatctaccacaccttgcaatctattaagtttctcaccccctcacaagtaaggtattcagttaagatgcattcctatgtattcagatttctaatcaactaatcctgattctcacgtaatattgacacagtatcaatattctcaaaagccaatagtctagagggtcacaaagatcctcaaagatactttatgcaaaatcctaggagtatagaaacagtaccttggtttatgtatacattcagtatttattaagtgtttccaatatggtataatgttaaggaatgaggatagagttatgaacagacagacacttgtctttatggatcttacatttggagggggacaaacattaaaatggattatataattacaaatgcagccgttctcattgtcttttcagatttctcagggtgtagactgagctactataataaaaataccccaagtttccatgtttcaaacaatatagatatgtgtatctttcccacataaagtccagcctaggtacgtagtctctgctctaaaaaggaacacaggctagcaaggcagctatactattctcaatataatactgcatttcaaaatctccatgctggtcccacaaatatccatgcactctctttcttatcatcaagagaacacacagtgccttcccaagagagaccagtcaaagtctcattcacttactgcatccagctaaaagtccattgtctgtggatgatgcactgtcttctccatcagatcaagatatggttcctcatggtccagtgacctataaagtgaaagttatgctatctgctcctaccacaaccaattctctctttttaaaatttttttaaatttttgtgggtacatagtaggtgtatgtatttatggggtacttgagatgttttgacacaagcatgcaatgcataataatcacatcatggagaacgggggatccaccccctccagcattaatcttttgtgttacaaacaatccaattatactcttatttatttttaaatgtgcagttacattattttgacgatagtcaccctgttgtgctatcgaatactgggtattattcatttttcctaagtattttttgtacccattaaccatcccgctgccccctccccgactcctccactatccttcccagcctctggcaactacctttctactctctatgtccatgagttccattgttttgatttttagattctgcaaataagtgagaacatgagatgtttttctgtgcttggcttattttgcttaagataatgacctccatttccatccatgttgttgcaaatgacaggatctcaatcttttctatggcagaatagtactccatttgtgtatatgtaccacgttttctttatccattcatttgttgatggacacttaaattttttccaaaccttggctattgtgaatagagctgcaataaacatgggaatgcagatatttcgtcaatatactgatttcctttctttgggtatatacccagcagtgggattgctggatcatagggaagctctatttttacttttttgaggaacctccaaactgttctctatagtggttgtactaatttatattcctaccaacagtgtgcaaggttttccttttctccacattctctccagcccaggcacaaagacagcagtaagtgctggacgaccacctatgcaagacctagactataaatccagtacttctctccctctccacacccccatacccaccactccattctgagttttcaaatgtaagctaagctaaatgattcaataaagctttttgaagtcaaggatgagaaaaatcgttgctttttatgtaatcccaccatcaaagtaataattgcttagttcaaattgtggtgatgcaaacaaggaaagcaagagagcataaaacgggtggatctgacgcagtccagaagtggaggcaatggttgtttttagataattattagagaagatactgtgatttggtttgaaggcaaagctcactgaagttctctagttctagatacacctatcgaaaaattcttacccaaataaatgtctcagtgataagagcagcctttccccaaatgcctaagtgtttttgttttgtttttgttttgttttgttttgttttgttttgtttttgtttttgttttttttcaaaatcttcctctggaatggatgctgaccttgtcattgacttattcttcaccacaactcagtcatattaatcttgaaagagacagagaggccactatctctgctaataatttacataattgtttttctacaatttggtgctaattaaaatgtgaaaggggtagtgatgatataggtaaatgtaataaggtcattctttgttcctgagagcaaagataatgtcaccagaaaggattgtctgtatattcacataagagcaggaaacaggaagagagacacagtaaggtaaaatagcatactagtatatcacgtagtctggtatagccaatgtagaatatttatttcaaaaaacaaataaagataaagttctgcttcactttgagaagctgttttttttaatcctgtatagttagttcgacatgttactactctgcctggttcaaattttgatttcactctgttccagttatatatgctatgcaacaaaccactctaaaagttactggcttaaaataagatagttttacgatttctcataattctgagagttgactatgatattcatctgcttcacctgatatcaaccaagacactgggaaagctggaaagtccaaaatggcctcactcacatgactggcagttggtgctgcctaccagctgagaactcagctaaagctattggccatgagcctcagtttgtttccattgtcttctccatgtgtctcctttggcttccccacagcttggtggttgagttctgtgaagaagccttccaaaagaacaagcaccaatcttcaaagacttatcaagcttctgtttgtatcacacttgctactatcccattggccaaagccaggcatatggccaagttcagaatcaaaatgagaagggactacacaaaggcatgaatccaagaggcgtgattaattgtggggctgccaaataatcgccttccacaaattccttactagctgtgtcatctctctgtggtctcagttttctcacctggaaacaggaacaaaaatggccctacaaaaatggactgagatatattaggttggtgcaaaagaaattgcagtttgggaccgtgaattttaaatcattataactaggctcaagcacatctttattaatcaaagtaggaaccgttacagtcaacacatttttgccaagaagaaataagtgtgtttattcctgtagcataaaaattcatgctttgggattcaatgaactcttggaaagcattttcttcatcctgctagttgtggaagcattttccctgtaaaaagttgtcgagatgcttgaagaagtggtagtcagttggttgagaggtcaggtaaatatggcagatgaggcaaaacttcctagcccgattcattcaacttgtgaagcgttggttgtgcgacgtgcggtcgggcgttgtcacagagaagaattgggccctttctgttgaccactgctggctgcaggcatggcagtttttgatgtatctcatcaatttactgagcatacttctcaaatgtagtggtttcgccgggattcagaaagcggtagtgggtcaggccagcaggagaccagtgaacagtgaccatgacttttggtacaagtttggctttggaaagtgctttggagcttcttctcagtccagccactgaactgggcatcgccagttgtcgtttaaaatccactttttgttgcacgttacaatccgatcaagaaatggtttgttgttgttggcgtagaataagagaagatggcacttcaaaatgacgatacttttattttcgctctgcttatgaggcacccacttatcgagttttttcgcctttccaatttgcttcaaatgctgaacaactgtgaaatggttgacattgagttcctcggcaacttctcgtgtagttgtaagaggatcagcttcgatgattggtctcaatcggtcattgtcaacttctgatggccagccactacgcccctcatcttcaagactcttatctcctttgaaaaacttcttgaaccaccactgcactgtgcgtttgttagcagtaacttggccaaatgtgtttttgacattgcgagttgcctctgcttctttacaatccattttgaactcgaataagaaaaacgctcgaatttgctttttgtctaacatcatttccatagtctaaaataaacataaaataaacagcaagtaataagtcattagcaaaaaaaaaaaaagtgagaaatgctcattaaaatgatgtataacataatcacatttatttaagaatgtatttcaatatcaaatggcaagttccatgaatgtgaaaacaacacttacttttgtagtcacctaatgacacatttaagaagctgaaacctgagctcagcacatggtaagacatcagtaagtattagttatcataatttttttagtaattttcctacagagctataaataaaatgaaatactttccaaacagtgataaaactataaagcagcaatacattataagcttctatcctaatctgccttcccctcagggccttaaaatgtgtcatttctgtaaatgttacctctgacatgaaagcaccaacacactgttcagcaattacaagttgattgtgacaagagcctcactctccctatttctttttctcttcctgtcttgctttcccttttccccatcctttcactcactttgataaggcaaactgccatgtagtcacaaaatcctagacaaacaagtctgtacctatgtgggcgatgctgtggatttagtaagggaaacagttccttgataaatttctcctttagccctgggtttccaacccctgtgtcattcagctatagaaatcttctgatattttctcccactggtcattttcactcaggctgccatcaaaatgagactacccaatgttctttccatttgttctgttttcttcctcgcctctgattccctgcctggtccacttagaaagtctaccttttttccttctctcttaataccaccaatctctaaatctgacttctcctttctaatcccatagagcctgccttgtcatctccaaacaagatccatcttggcctcctgttatcctcagcccacagcagtatttcacttacaacgttcgttagtttctacctcagatgtgtcaggcatttagtttgtaccaatattttatttctttttatatctacaccaagcctgcactagacggtccaaggagaaatttaactgattcctgttttgaagtcctccccactccttgggagagttaaagattcctcagtgtgttaggtaatgatagttaatatttattaataacttactgtgtatcgactgtattctaagtgctttgcactgttagaaggagaataacctaagactgtgccaaacagcagtctagaacaaagctgaattccttgcttgcctggcaagggagaatgtggtacatactaaaggattaatacatgttcactattaaattgattgattgtggtggtggtgacagtggtgatgacttttcaagtgtgggtaaagtaattttttccaacaaatccacatccacatatttaagaaaagagagacatttcattctatctttttgtgtgcctttgagaggacacccctggcacccaactcccaggcaaatgccaccatctgtgtgattttccttcatttgccaacgaaggcacagcaggtactactaggttaacctttgctttcgcaagtcttctctcaaaatagtaaacacttcagctgttggaaagctctaatctcaaactgcaaatttaaaaatctctctctggagttcaaaaaatagaaagaaaaaataaaaatctctctcttctggaacataatgtttgaactgttacatattattcacactatttcacattatgggattatgaaatatggttttaggtgttagaaaaacgaaagaaaactattatttgttaacactaaccgagagatttttatgatattcaagtaaaatgatagaatgaattattttaaaaatgcatgaatcttcaccttctgtgaagtgtcatggaggattagttctaactaatatgcctgtaagtaactgacttaatgcgtctattggttctcttaatgctgtaagtgacagaaaactggtctcaaactgatttaaacaataaatatgatcaaggttccggttttttgtttcttgttttttttttttttttttcacatttctctgggttctatttttctgtgttgacctagcagcttcacctgacttccctcttggtgacaaaaatggcctgaagccgtttcagaacccacatctgcaaacttacttttgatgaaaatcatctctttagggaccttctttcccaaagcatccaggaaagactgctctgaaactgactggcctgaattaggtcacatgctcattcctgtactaaatcacacctcacttctacagctaaaagtcattaaatctcaaccaaactctacagctgcaccacaacaaaggtagagaagtaggtgcaaagttcctcaaaggaacgtaagggtgaaagatgattgactgataaacagacaggtagacagaatagatagatgaattaggaaaagataaccaaccaatatctgtcacattgctttgacttgattttttagtcaattaatgaaactgaatggtaattttgacattacaacaatactttccaaatgtaggcaggttgtggagatcatttaaggaaaaaatgtatgaggtgttgtagcagatactgtcggtgccccaccgatatccctttagcacttaccatttttatacgtgcttcttaatttccaacttcctgtacttgcatctctttgcttggggctatctctgctcattcttgggagagagcagaaatgtagcagttatgcccctgtagagcagcagttgatagatcaataccctgtcccccttgcccttcagatctaataactccaagcttaattccctacatctttcatataagtatatatataagtatatatatatacttgaagttctagggtacatgtgcacaacgtgcaggtttgttacataggtatgcgtgggccatgctggtgtgctgcacccattaactcgtcatttacattagctatttctcctaatgctatccctccccagccccccaccccacgacaggccccagtgtgtgatgttgcctgcgctgtgtccaagtgttttcattgttcaattcccacctatgagtgaggacatgcggtgtttggttttctgtccttgtgatagtttgctcagaatgttggtttccagcttcatccatgtcccttcaaaggacataaacaactcatccttttttatggttgcgtagtattccatggtgtgtatgtgccacattttcttaatccagtctatcactgatggacatttgggttggttccaagtctttgctattgtgaatagtgccgcaataaacatacgtgtgcatgtgtctttatagcagcatgatttataatcctttgggtatatacccagtaatgggatggccgggtcaaatggtatttctagttctagatccttgaggaatcgccacactgtcttccacaatggttgaactagtttacagtcccaccaacggtgtgaaagtgttcctgtttctccacatcctctccagcatctgttgtttcctgactttttaatgatcaccattctaactggagtgagatggtatctcattgtggttttgatttgcatttctctgatgaccagtgatgatgagcattttttcatgtgtctgttagctgcataaatgtcttcttttgagaagtgtctgttcctatccttggccgacttttcgatgaggttggtttttttcttgtaaatttgtttaagttctttgtagattctcgatattagccctttgtcagatgggtagattgcaaaaattttctcccattatgtaggttgcttgttcactctgatggtactttcttttgctgtgcagaagctctttcgtttaattagatcccatttgtcaattttggcttctgttgccattgcttttggtgttttcatcatgaagtccttgcccatgcctttgtcctgaatggtattgcctaggttttcttctagggttttatggttttaggtctaacatgtaagtctttaatccatcttgaattaattaatttttgtataaggtgtaaggaagggatccagtttcagctttctacatatggctagccagttttcccagcaccatttattaaatagggaatcctttccccatttcttgttttttgtcaggtttgtcaaagatcagatagttgtagatgtgtggtattatttctgaggcttccgttctgttccattggtctatatctctgttttggtaccagtaccatgctgttttggttacagtagccttagtttcctacatcttcttttagggataacagggagtattaagattcagttgttcacattgatgacttgcatgataatataccctttattggctatcttccctatttcacttcttctcaccctgttgatgtgtcctggaatcacatcccaaaactacttgagctcaaatttttatttctgggtttgctactgggagacccaaatcaagacagttggcttcagtactcaggtacttacaaggagatcatggatatcaattgaatcagaattccatgtcatagcttttcaaatttatatcacaataagttgaaaagatgttgattcttccttccacagtattttctgtttctgtgtgtcttacattctggtgtctcaaaacatggctgcaaccagggaaggaattgaaatttggagtaaatgtcctattttagtaggtctacatttaagacatggacctgaaattgagatcataaacaaaagtagatgtgagcataaagtagaaggtgaggttggagggggaaattgtttggatttactgtaaccaatggagctgcttagtctagtcaaggaatttcaatcatttctgtggagactagatgacttatgttatacaaggatatctctggaaaattcactgtacagttttactaaatctggctgataatatgttcactcaatgttatgatgtcaataatagaatggatattgcctttaaagacaattttaaagtaaatatctcacatattcctactcatttatcaagggctgtgtcattcatggcaatataagataattcttttcactttcaaaatcttccagatgcagaaactttccaatatttgctgtagatgaaagtgtacaatttcacaattcaatgggacaaaaagaattaggaaaaatatgtttcagagagtttatttggtatcatctacaagacctggtatgagacctggttggtgttgtatggaatgaaatatatcagtctgttctcacactgctaataaagacatacctgagactgggtaatttataaaggaaagtgatttaattgactcacagttcagcatggctggggaggcctcaggaaacttacaatcatggcagatggggaagcaaacaccttcttcttcacatggcagcaggaaggaggagaatgagcaaaagagggaaaagccccttataaaaccatcagacctcgtgagaactcactgtcacaagaacagcatgagggtaaccgcccgccgtgattcaattatctccacctgatccctcccaggacgtgtgggggttatgggaacaacagcttaagatgagcttttggtacagacacagccaaaccatatcatagagtttcgaatctgaaaaacaaaagaagctaatttagtttcagaaagctgagatttcatgaaccatttaaaaattcactttataatttttcatgcattttgaagcctttatcctttaaatggaaatggaatagaactattattcgtcatttctaaactgtgcattcatcaacaattttcagaagttaattccaacatgtcttcatcaactctatattacatgttagtacactacatctctattttcatgctataattttttactttttcctcacactttcatctcaccctctcaagatgtgttaatcccctttgctcttttccccatctcgtctctgttgcctttctccccccttcctttttttttaatttctgttctcttttacctgaaatctccctcttcatcttttgctaccaattatgttcttaattggttgaagtgagcaaggtaggaaattctccattttgattccattctctcacatggtttatctttaatatgttttaataaacagtttaacataaatcttacttccaatttaacatgtaaaatttagaaaattggtgaaaaatatgcctgctttttcacccccaaagaaccaagtttaaaaagttttgtgactttgaggcatccttttccctaaaagcaagcttaacagattcttagcattcgtctctgtgtgaaattgtggaaactttaaaaaaactatttgaagtaccaacaactcaaagataaattgtctgttttaaatgcaaggtgctaaaataaaactagaagattgacaatattattcatctttatcactgttctacttaaaatttgaaaattaatgttagaaatgtgagagggtgcatgaaaccttaatggttttatcatttcatctgagtatatatttgatttcttctttctgacattgaaactttaaaattcgccactatttttcagtaactcgttaaaatatggtccgttcttatatttgcaatactcctatactgaaaaccctacaacttcaccattatttaatttttatgttactatatttgtttcttaaaaagattataatattatgtattagttgtctattgctgcataacaattactacaaagataggggcttaaaactgtatctttagagtatcaggatacatatgggtcagaagtctaggcatagattatccatattctttgcttcggggtctctcacaaaggctgcacactaggtgttggccagggctagggtctcatttgaaagcttgccttggaaggacctgcttccaaactcacctgttgttggtaagtttcagttccatgtgggttattggactgtagtcttccttttcttgttggctgatggccacgtttagttccttcggtctctaacatggcaatttgcctcatcaaaatcagtgagagaaagtgggggaggggggaaagagacagagaaagagtgaaattgctagcaagacaaaagtcccaatcttatgtagcctaattggagaagtgatatccttttgtctttgacatattctgcttgtcagaagcaagtcaaaagtcttgaccactctcaaggggaggaaattattaaaggactcaaatactaggagacagagatcactgagtgccattttagagtcttcccaccacggattatttcccttcacctgctggcatttgaaaatgcagctaatactctgggattctccaaacctaatttttttgtataattagagaagtatttgtcataatctgttaagtgtagtaatatattaagaaattgaatttattccttcatatttcaaaaagtacatggggttgggggacagctatgttgtcataaactttaatacatacatgattggaatggattatgaaatatttttctctaagagatagtataaggctgcaaccactgaggctcccaaatacagatgattcatatgtatttagttttaatgcaaagcttctcatgctgatttaaactctcatattttcatatatggtgttttattttttatataatgaatgtctataaaattcctattattttttcaaaagtattgtggcaaatatttcctagtaaaatctaaagatatctttgacgtaatttttatgctctcatttatgttaagaactcaatattgaagtaatgttctttcttatttcctagtaactaaaatccttactatattcatgaagagctgtgcctctattaaaaagcttttattgcaaacagaaatgtcaaaatacagcaaaggtagagctatgtatgattcttcatctgtaatgtaattttaagtatacattttattgcataagcagagatttatacccacatttgctttcagtattcacagaagaattttcatatgtatttcttaaaataacaaaatggctgctttggtgtggggatagtatggtacagcatttattgtgaaaatgattcttatcttccatctttttcaaatggtgagttcagtatgtttaacattgctggttttataatattgcgaatatttttgagaggaagaaacaataagagactgataagaataattcatatttgctcaaagtttaatcagttttttatttgaacaaaaacttggacgaaatgtccaactttcctttgagatcagtgctctccaatgtggtaacaacagcctaccatatgagcatttgaaatatggctagtccccactgaaatgtgctgtaagtataaaacactcaccaaattacaaaacctaagtatgaaaaaaataaaatatctcattggtactttttatattgagtacaggttgaagtgacaacaatttggctatttaagttaaagaaaatataacattaaaattaatttgacctgttttttacttttgtaatgtgtagaaaattttaaattacatgtatcgctctcattataattttattggatgtcattgttctagataaacaatggcaatgttgagaggtgtcataatagggacaattgtctctgtgaagaagaaattatatgaaccctacaacatgtattagccgcagagttgcttagaattgacttactctgtcttgttgaaaataggttttcccttaaaatctctgcctgatgtagccaaccacgattcaatgagcaaacaaaaatcttaaaggggaaaaaatcattttttgagtctattttacacacccagtatcaaaaagaaaaatataaatccacaactaggattatacgggatgtaattcttggatttcttttggtcttataatgctttatacctaggagatgttcaacaaattattattgaatgattgtagtttaaccgtcagttacattttgcagcaatacatttattagtagcaaaatctgagtgtttactaattttcatcacctaatcagcaaattagtactgctcttatatcgctttgcctacgctctactcactggttcaatcagctaattttttcagaattttatggtttataaaccactatatgttgcacagtatttcctatacattagctcatttgagtcacagaagttataggaggtggatcttgtctttctttgttcagaaagagaaatccaggttcagcgaggttaactggccttgtttaagatcagcacgttgctaggtgacagaaggtgttcacttctcactgaactttgcatatcaaaagagatttaaagaattcactttggagagcgggagttatggggtgaatattttatcatgttgtccgtcttaataatcaccaatttgatactaaggctgctagtcatctctaacgaagagaagttactttgaagttggttgattgattgttgttgattgacagaagtattagttttcagaatgaactaattcattaaagaaataaaacattgggtttgttcattccataaataattgaacatttattatgtgtatgataccagcctaagcagatacctaaaaggaatggagattactatagttaataacaatgcattgtattcttgaaaattgccaagagattacattttaaacattctcaccataaaaaaatgataagaatgtggggtaatgcatatgttaattatctcaatttagccattccacagtgtatgcatatttcaaaacatgttgtacacaataaatacatacaatgttatgtgttaatttaaaaataaatacattagaaacggtaaaagtcactaggatcatggaaataaaaatgtttacatttatgtaaatattagtaatataatagagggcatatccaaaatatagtgtcatattaataagatgttgtatgattattatagactacaaaataataaaggaatagacagaatgtttctaaataaagaatagaaattacagtgaagcggaagagagagtaaccctaaacccttcataatcctccctttgcctcgtagtatagcttggaaagtaattatgtggaaagttgagattgcaacaaaggacggtagtacaggagttgcccaaggacagacaattattttctcaaataaactatagcagaagcaaaatggccttggaccacaaaagaaggccctcatgtagacattgttctattctgaagtagaatttgcagtactcaagagaagaggaaagattattataggtggagagactgtaaacaaaatattatggtaggattcctcctgaatagagcaaggtgattgtgtttgacattgaaaaggtatgtttgggcaagagtttgaaaacctttagccaccatgctaagagatcttaaatctttatctctgagtaagggcggtggttgtggttaatgatccttgagcacaactctgtcccattaaagacagtagattcaactgcttctagcattagtccatatcagggagtaaagtgatccgatacattattttcccccagtaaatggttcataaaggaaggccttggctctgccttgtatgtctacatgggagaatataccagaatgtctagaggagcatgggtagcgtaacctttccccatatgcacatacaacaaatactgataatccactcacaggggagggactcatttttaagaattaagttttattttagaagactcagtctgatggcaatgcaggggttgaattacagcaggtagagactggaggtctacaaactggtttgagatatatattttttccggtggcccagataataaggacttgaacagacttcttgctctgggaatgtaaaaggccaggctggatgtaagaggttaggaagttccaaactgtcccacattttcctttcttctgagccctccaaactgtaccagactctgcatgttacgcacttccaaagtcgcttccacattttcgggtgtcttttcagcagtgccccactctactggtaccaaattactgtattagtccattttcacactgcggataaagacatacccgagactgggcaatttacaaaagaaagaggtttaatggacttacggttccacttggctggggagacctcacaactatggcaccaggcaaggaggaacgagtcacatcttacgtggatgggcagcagtcaaagagagagcttttggagggaaactccgcttttcaaaaccatcagatctcatgagacttattcacaatcactagaacagcacaggaaagacctgcccccatgattaaattacctcccactgggtccctcccataacacatgggaattcaacatgagatttgggtggagacacagccaaaccgtatcagtgatgcaaaataaaagaagactgtggagtaaattacacatggagaaaaggaagaggaactaggaagtatagatactgtgagaattaactctctgttctacaaaagaagaaatgggcttaaagtggttccccccaaaactaaaatccaaaggcacataagtcataatgcacactgttacaccgagtccttccagctcttaacttacttgttttactgcactacacttgacttgagttttagacttagtaaatctgaggtaaatgcagattgagaatgagaacaaaatgttaaaaagagaagcagtctcattttcttactactaataggcattgcagtttgtgtgggctctagcagggatgtttgtaccactgggatctaagcatctatttctatattataaatagaaaaattaggttgagctatcgcgactccattacaaacttatggaattagattctctggtatggagcttggatatacatattaaaacaaaataaaacaaaaactcctacccaattgattctgctgtgtgctctagttaagactgttatggttaagaaaataaataatcgctgtatggaatgtatatcgtcctattttaaattaataaaaaaaattttgcaggccttcccaccttccaactcctagagacaacaaatccagatttgaaaatcagtcatattaaatagttgtatcgatatttaccctttgtttctacgttattattttcttcaattttcacacgtatttgttcatcagttggttatgatggacttcactttttttcagtcttacgaatgagatttctccctccaaaaatcaataggcacctgctgattttatttattccaacatgaagttgcagaaaatgaatatggccaaaaatggttaaaaaaaaaaaagcctgttcttcaaaagactagatcgtcagttgaagcagaaaattatattcagtgcactggatttatgcattgttttagccttctccaaccaatttagaaatgcattttcttataaaattgagattattacaaatcctgtgctaagcagctgaaataatgtgcctatgccaaggtcatatcttaaaagtttggaggagcacactgcaattgaatataagtttataaatgtattccacatacttttctgatatattttaataatttaatttttacattttacctatattgtcttcattttcactttacctttggtggtgtttcatacatattcattgtttggaagaaattaagcagacagtattctaaagtcaatactgagtctgctaatgaaaatggttaagttaattaactaaatggcaaccttcactgaacttattcaaagctatttcccctcatgatgtgttttcctgaagaaatgatgcataaaaactaaacccctgttattcgctattcttctgtatcagcctctaaattgtcactttacatgttacaacctgttgcatgatgattaattatgacaatttaatggcatgtaaagggtaaaaccctaaaggattactcaaaccatcattccttaagaaaagaaattgtaatgcctaggttatcttctagggtttttatggttttaggtctaacgtttaagtctttaatccatcttgaattgatttttgtataaggtgtaaggaagggatccagtttcagctttctacgtatggctagccaattttcccagcaccgtttattaaatagggaatcctttccccattgcttgtttttctcaggtttgtcaaagatcagatagttgtagatatgcggcgttacttctgagggctctgttctgttccattgatctatatctctgttttggtaccagtaccatgctgttttggttactgtagccttgtagtatagtttgaagtcaggtagtgtgatgcctccagctttgttcttttggctcaggattgacttggcgatgcgggctcttttttggttccatatgaactttaaagtagttttttccaattctgtgaagaaaggcattggtagcttgatggggatggcattgaatctgtaaattaccttgggcagtatgaccattttcacgatattgattcttcctacccatgagcatggaatgttcttccatttgtttgtatcctcttttatttccttgagcagtggtttgtagttctccttgaagaggtccttcacatcccttgtaagttggattcctaggcattttattctcttgaggcattaccattcaggacataggcatgggcaaggacttcatgtctaaaacaccaaaaccaatggcaacaaaagccaaaattgacaaatgggatctaattaaactaaggagcttctgcacagcaaaagaaactaccatcagagtgaacaggcaacctacaaaatgggagaaaattttcgcaacctactcatctgataaagggctaatatccagaatctacaatgaactccaacaaatttacaagaaaaaaacaaacaaccccatcaaaaagtgggcgaaggacatgaacagacacttctcaaaagaagacatttatgcagccaaaaaacacatgaaaaaatgctcaccatcactggccatcagagaaatgcaaatcaaaaccacaatgagataccatctcacaccagttagaatggcaatcattaaaaagtcaggaaacaacaggtgctggagaggatgtggagaaataggaacacttttacactgttggtgggactgtaaactagttcaaccattgtggaagtcggtgtggcgattcctcagggatctagaactagaaataccatttgacccagccatcccattactgggtatatacccaaaggactataaatcatgctgctataaagacacatgcacacgtatgtttattgcggcgctattcacaatagcaaagacttggaaccaacccaaatgtccaacaatgatagactggattaagaaaatgtggcacatatacaccatgcaatactatgcagccataaaaaaggatgagttcatgtcctttgtaggcacatgggtgaaattggaaatcatcgttctcagtaaactgtcgcaagaacaaaaaaccaaacaccgcatgttctcactcataggtgggaattgaacaatgagaacacatggacacaggaaggggaacatcacactctggggactgttgtggggtgggggaaggggggagggatagcattgggagatatacccaatgctagatgacaagttagtgggtgcagcgcgccagcatggcacatgtatacatatgtaactaacctgcacaatgtgcacatgtaccctaaaacttaaagtacaataataaaagaaaaaaaaaagaaaaaagcaaagaaattgtaaaatgttgttctatcagaaactcggctaattatttttaaattttagatcaaaaactcaactagttttaatgtactacttataagtcagataaaatcattttttatttttgttttctttttgtttttacatctgttagaaacgatggggtcttcaaagtaaaagaagagatttgcaatgcctataccaaattagttattttaggatactgaatgaaatggttttctatactcaataaaggtaaaagaataagcagaggtagatctggttttctgaaacttgaagcacattctaatttggcagttttctttaagtcaaagaatataacaggacaaatataaaattaggtatgaacatgattatagaaagaaaggaaatcataacaaattatacgtttttaaaaagatgacagataaccacatacatcacaaaaattgaaaaaaataagcagaatgttttcttaataatgaaccatctctgcaatactagaatatacagtgtctgaaataattttttctatctttctggatgcatcctctttcagcacctcttcatgtgagagcatcagaaaataatttactctttcccccagcattgttgattaaaatttgacttctatcattgatagtttagaaaagtttattttacattttcaacttattattggtgatgtcacataaattattacaatttattgtccaatttaggaagaccctgccaagtttctttcacatatgaactgtaaaatttaaaagatcattcaagttatcttgtacaataactaatacatatttttcttttagtcatactaaaccctgatgctaaggatcacccaaactttttcagggaaagaagtagcttgcaaataaatcaaggaccatttatccttactttttggaagaaatggaaaaggataaagtgttagtttaaatacactcaagaacagaatgtaagacaagaaattggaagcagagaagttcatcctcaaatgtaagagtgaaagaatagggttaatgaaacaggaaaggggaaatccaagaaaaattatgccgcgctttagagaatctcctaagcacagagatattggcaatgtgcagatgaaatagctgtcacaggtcagccatgtcagaggtgattccagccactaagtatctactgcagattagatatttggaaagcagaatgagctctgttcatgccattactggggcttgacttcttaatggtttcaagtccccctttgactctaatccttctaaagtcaactttgtataaactcttttcaaaagtgtttatccctgtagaataagttcaaaactccatgtcatggcacacaaaactcttcaaatcatattcagctggtattgttttcttccacattccagtcataactaggatcccaagaattagcaaataaaaatatgaaacatccagaattctaagcataactatgtcccaaatactacaacaaaaaatactgaaaagtatcgattgcttatacaaaatgtaaatggtatcctgtattttataaggcaaccctagtcataagatctctttcttcttcctcacacactgtcaagcttgagccaacagagtaccttttaatgggctgcgcagaatagctttcgatagtttacccattaattaacagaaaattcaaatgagatatcctctgtgaaatcatccttctctcctgcctcctgtctctccattctttctccaggagacagaggccctccagactccatgactttgtagtgtattgtgtctgtctttattagagtattcatcacttggtaattgaattctgtgtttaaatacattttttttcttccagaataagtgttcatagaagggagggatgatttacctagcatactgcctggcatataaaaggccctaaataatttttcttttaaccagtaaccaactaaccaattcaacagttttttaaatgagtgaaaccactttttaaatttttttttaaattcatgcttcacctgtaaaaatatatagatgaattgcaatctggaactctgagtaatttatataaaagtgatgaaaaagaccatggcttcagatttgttgttttaattccagcttcagttcatacaaacattacaaagtcgcagtatctactgtgtaaaaagtttcatcccaatgaagaaattaaaatgtctgtctaatagagatgctctaatggacagcgatgtgtagacttcagaagaatctcctcacacagccttggaggcataagttgggaacagagcaagttctgtgtttgcctttcaaaggaatgttcctttccctttcattgacaaatattataaagatgccccaaaacttctgtgagtttcccccgggacgtaaggtcctctgcattttcctaacttgtttctcaaagcggtggttcccaaggcctgagaatagctgtgtctcagctctctcctggaaaccagagcctaaaatgttgccacatcatcgggaatgtagctgcatacttagccagagccaagagatgagccccactcgcaaagcccatgggctggacaaaattgttagccatttggtgtaggtcattgcactaggtccattacacaggttatctggcaggagtcccggctttggaggaaagacgtttaaatcctgtaaataaatggctggaacaccatggcagttgattgtgttaagccctcatccaaaattgctttgttaggttctattctattgctcattatcttgctgtgaagaaaattaagcttacatctgcttagggtgacagggtatcctgttgtcacaggattttccacattttaggcctatgtcacaagctcccaataaaccctcagagaagatcttttgtgttcacaggcatccaggtgtcaggcagacacagtctttgtcttcttgaagctcagtgacacgttcagggctgtgtatactcctccattccctgccagagacaaaatgtttgtggaacagtcaagctagaagggacctcagaattaatctgatcaaatgtctgcatttttcagttccaaggatactcagggaaggccctcggattctataagtagcggtagaggtggtattagaagtcaggttgcctgacttccaaacctctgttagttactgtcccttcccctgcatgcagcactagtgtaatccctcaactctcacttccctttttcgccacatgcctctctctctttccttcccttgattaccctgcctatccctcctacaagggaaactaccaccaggcatcctcatctgagacccgggaatggaggccaggtcttttccctccctccctccctttcccctttttttgtgtgacagtaacattattcaagtacagctcttccttttttcagtaccttccccctcagaccagaagttaatgaaaaatagggttgcgtgatatgcagcctgggggccaaaaatgtaggacaagcagtgtgcttcagacaaaactgtagggttctggtttcatgcacaaccttggaggacggtggctagaggccctagtatgagagatcaattaaacatggaggccagaaattaaccacatgggattaacatacgtaaggttgcttcttttcaatgagtctaggaaacacactggggacaccttgttcaagacaagctactatttgatgctccttcatacgcttgcttaaaatatttgttcagcatttatttagtgggggcaagaaaaattgatgttatgttaataagaaaacctctttacctcttaccttttattaaaataatcaacttagaagatatactaaaactcacatgacttttgacatctatggatgatctttcatttaatatttttctgctattcctactatagaataaaagctgctattgcattattacagagcgtaatgtgagccacatatgttattttaatcttaatggccacattaaaatagtaaaaataaacaggtgaaatttatttggattatatgttttatttaacccagtgtatctaaaattgtatcattttgacgttgcaatcagtgcaaaaatacagtcatgctatgtgtaatgaggttttggtccatgataaactatatatacactggtgatctaataggattataatacagtaggtttaccatacctttttctatgtttaggtatgtttagatgcacgagtacttgccactatgttagaatttcctgtagtattcagtacagtcacgtgctgcacaaatttgcagcccaggagcattaggctatatcatgtagcctaggtgtgtagtaggctatatgtaccacctaggtttgtgtaggtacacactatgatgtttgcataaggataaaatcacctaatgacacatctctcagaatgtattcctgtcattaagtgatgcatggatgaattaaaatattttggattctttttttttttcagtactatgccttcggaatccaatatgtattttacagcatatgtctattccaaataggcatattctgggctgggtgctcaatagctacatgtggttagtggctaccatattaaccggtgaagttctatgcccatcaaggctacacgtaatttacagggtataatagtattttaaaaattaatttttttctggcttttatgttgacatatcgtttccattttttaaatttttgttttattttctttcactgctttggaaacgcacaacttcttggaatgcaaattaaaagatatcaaataatgatgtagataatttgttattgctaaatgtctaccacttgaaatattcaagtttcaaatttcagctaactgcgattgcaagcttcagctagctggtcccagatggatggcccagctaaatcagacatttgtacatactggctacaaagtgtcccaaaaacagaccaggagggtcgtggatttaaaaaaatttccaccaaaggatgctgtcttgtccattttccaatttgggtaaattaatggatactgcatttaaaagtttttttatttctcgtacattgaagccctgtactgcactcaccaactcacccgttaaagcggctctgaaatacaggcaggaccaagacttagatggactggaggttgggccacaactccttgaacacctagagcagaggtcagcaaactttctataacggtccagatggtaaatgttttaggctttgcaggccaataggtctctgccacgactacttaacaccgctattgtggatcaaaagcagccctaatacgtaactacacataaacgaatgggcatggctgtgtcccgtgacaatttacttggggacacaaatttgaatttcatataatattcatgtctcacccatttattaattattttcagtttcttcaaatgttaaaacaattgttagttctcaaactgtacaaagacatatggtggctgaatgtgacccataagccatagtttgctgccctctgcccaagtctcctgttgaaatggggttatggcaacaatcctcgcagaatataaaactattttggcacctgacttttgccctgatttttttattgtttccagagaaatcaagtatttttctttttcaaatttatatccatattctctttttttctttgctctcttctcttctggccagcaggaagagaccaacccatctttgaattgtattcactttcctcataccgtcacacagctagtaaagctacaacttcacatatgccaatgccaactcttcccgatgttgtgttcaaaacctttctaagcatcaccattcccaggagtagcaattctatatgatattattattttacttgttggtaaggttaaaagttccagggatactgattttcttctttgttagccatgtttcattgagtggataagcaatatgcatttgcttcatagtataaataacaataatgcatcaaattgcaacaatatgaatattacacatagaaaagataaatgtgagttatgtaggtcatgccatttgatagaaaattttttttatatttatatgtttaaacatgacaataaaatgattccattcagatgaaggcaaaggaataggatttcttttcagtgtggtggttttctatttttgttttgttttgttttgttttttagagaatgagttttggagaaaaacaagctttctagacagaaaatattgaaattaaaaccagcaattcatggtcatattattgaaactatcaaattggtatatatatttgaacactactgattattttctaaaatgttacgctttcaaaaaatcatgaagattggcaagttttttagatgcataagcaaatagtgtagtacggcttgtaacactgttcaagataacttttttataatgagtatggtctttctctgccctgtctaatacaatgtgggttttgagcattggaaatgtggtaagtgcaactaaggaactgatatttaaattgtatttaagtttaatacatttaaatttaaagttacattttgataaattgctttgtttttcttttttctttctttctttcttcttctttttttttttgttttgttttttttgaaacaacaatctcactatgttgcctcccaggctggtatccaactcctgggctcaagcagtcctccttcctcggcctcccaaagtgctaggattataggcaggcaccaccatccccagctaaattgtttcttaaatgaaacttctgaatttgaggatacgtgattatgtggtgtagttttccctttctttccccccctgaaatccatattctgaagtacagtgatttatataaaagtaaaaagaaggagactgttttttttttttaaattctattaagaaaccaaattttaacagacacctcagggcctaaataaatatcaagttattgttatttgttatggttcttgttgcttgggtaaaactgtacagatcatgacttagttttccttgaatttttatcaaacaaatgaacaaaatgagcaaacaaaaatattaaaaatgatatttcctacgaatccaagggacatttttctgtatcagccaggctgatgctaaggtccttcaagcaaataagatcaaagatttctgattggagagtgtgggaataaagtagcccttgtttagtgctactttgtagagcctttgtttagagtacggctgggagggagggagagagggagaaaaatacggggttaatttgtaacaacacattctgtggtgtgcgtgtgtgtgtgtgtgtgtgtgtgtgtgtgtgtgtgagagagagagagagagagagagagagacagagagagagattaaattacatttaacttctttaaattttattgtcctcagggtttaaacagtatgtgaccaaaatcacattatttagtgaagagtttgtgggtaggtggatagttagatgggtataaatccctataaaatccattttagaactattgaggtttgagcaaatcaatgtcacctattcacttcatttgtctaatgcctccaggagccattaaagggcttgttacctaactttagggtaggtttagatcaaggtgaacagtcagaaaatattatccatgtactcacgtatattattaagtattctttgaccatggagttagatgcttatactgcaaacaaataaattaatgaataacagtgctgctcatgaacaccaaagtttactgaaaagtcaatatggttttagtgtggtaataagggcagagttctccaaggactgccaacctatttattgtacatcaaattttactgactttgaaatcttgctagaaatgttcatttacctcgtaatgtattatatgtttgaggtcttgagaaaaataacaaaatccatgtgtggtaatgaagtggttatgcaataaaactaacatacactgtgatttgacacaggggacttcactgttatcagatacttaaaactggaaacaatgtaggaaatatagatgtataagcatcgtaagtaaaatccacatgctttaaaaaggaaatccacttacttttaaagtaatattccgagagctatgccactgggggctgaatgtcataaaaatgatttgtaattagtcacttttacattgtatatggatttatagttttaaaatatctggtggcatataaccacaatgtatttttcagtcatatattcatcattattttattaaatttccagagggaaagaaaataaatgacctcctagtgagggatattttaccacgagaccagttgtaaaaataatcgagttttgtgcctgggaagatatctttgctaagtctagttctccagtgacattaatttattgttgttaagaaatgtgtgaggcaaaatgaactctccaaatatttcatactacgtgcattttatccaaaagaagataatggtttacatgaattatttaattggtattactaatttgggggaggtgatttttggttgggggcaacagaatatttgcctaaaatgcattcagagtgcgctgttatttagctattttcaaggtagagggatattggcattggagacttacacgtagccatacaatggccaacttcagtcaactacagaagcaatacagggcagcggctggaacaaaatagctactaggtaaatattgattgaattaattacacggatattaccactagtcctgcaattaattaatacctagccctgtctccagccccagaatccatgacatcaagctaactaacagaaaacatatcaagaattttattccttagtcctcttgactgaccctcaagagggtctaccctcttctactctgtattcctcacatcaaatttcactagtccagccgccaagtaacacctgttctgactgtgctagtgaacttggatattcacacatagcctaaaatgggaaacagagttggaaatgtcatgtataaggacataagcgttttcaaagtgtacaagaacataagcgtttttaggagatttaccttctcttttctgttttattagcgaatgattgattgttttgtatgattgttcatttaacaaatgctatatcatgtaagaaaagttactaacggtatataaagatgtaaaattcaattgtggctgtgtgtatgtgtgagtattctagcttttggggagagacaagagaagaaagaagacataagttggaagagaacagtaaaataaagaaaaaagtaataactgacggtgtctaatgaagtagcccaggtaattaatgctagagtttattagatagaatcattatttccttccagagggattaagcaatcttctctgaggaggtggaacttttattacccaaaacatgaaggattgggaagagttttatatgtgtcgataaggaaaagagatattttattgagggaaaagaagacattttaatggcagagtacacaatgtcagaggaacagaccaaaagaagtgctttgttattaggaagatttgaagaatggaagatagcgtcagattgttaagaaccattttttagataaaggcaggctaaagaagttggaggctattggaaatcagtcacacaattttaagcaagagaatcaatgagtggcagttttgaaaactgaatttgatagtggcaaggaaaatagggctctatcatcccacttactttcaaagttatgaagaaattgtagtaagctccagtcagtacctaaaggaatttattttgtgaaattgtgtaaacaaaaagcaaaccttcttttgcactcatatagtatattttctcaaagtcatatagctaaagggaatgagaggtaaaatagtacagtggttaacaggataggcttcaaagcctaacttcttgggttcaaatcctagcttggttaccatttcacagctatctgaccttgtacaagtcacatgcgtacactgggaacaataatactacctgtattatagagttgttattagatgttgttgatagatatgttgggcacattttaggcactacatacataaacctctttctatagaagtatacatgtgtacctatatttaaaataatgattttcttttttaaaagaagcacatattcattgcagaaaatttttttgaaattttaaaagtaaaatctctggtctaagtgcactaaaatgttttagactttagatatgaactacaaaaacctacctcatcgacacccaaccccactcccagagatatttcattttatttgcttgctatcagtaatgagaagacccaattcaccacacaatttctgttgtatgagactattgtattgcagtgcaagatagtgttttaaatctttgttaaatcaataggtgcaatattacacctccctgtttgaattttcctagtgaagtcaaacaattttaataggcctatacataggtcagttatagttctttcctaaatggtctattcctcattatcctttttaattgagtatttgtctttttttctactgatttgtgagaatgtttttatcttaagagtgtcaaaaagatgaattgtttttgcctttttctttggcttgtttgattttttatgtaaagaaattttatactgctatgaatgtaagtcattactttatggcttttaaattaaaattataagaatagcctcccatattttcattacttttatagttcaatttttttacatgtaacatttcattcatctggtatttagttaggaattgtgtgagataggattttaaaattaagttaaaattcaatcaagtctttattttttaagtacagaagtttccgaattcagcatttacattaaattttttgaaaataatgctaaaatatcatgtaaattattacttattggaattgaaaattccctattattatttttaatctttataacaacttatgttatctatgcttctattataaaataaatgacaagccaaccaaaatagagaagatgcttatcacaattatatcatgataatttaaacatgattttggattaatcataatccaaaaatgcatttgataagcattctaactgttcttctagtccccataaaattaacaaatggcaaacagtaatgttttaattttcaaaatattcatattaatattcattttcaaaatatgtttacttgcatgcatttcatttatattatttcttattgaagttgacttctcaatgtatattgctttaatgatactaagtattaagggtatagattgtactcacacaaataactattgaaaagcataagtttaaatagatccatttatcaaatgatgtctttttttttcttttttttttttttttttttttttttgtgagacggagtctcgctctgtcgcccaggcaggagtgcagtggcgcgatctcggctcactgcaaactccacctcctaagttcacaccattctcctgcctcagcctccagagtagctgggactacaggtgcccaccaccatgcccggctaattttttgtatttttagtagagacggggtttcaccgtgttagccaggatggtctcgatctcctgaccttatgatccgcccgcctcggcctccccaaagtgctgggattacaggcgtgagccaccgcgcccggcccagatgatgtcaattttgaaagatactggaaagtatgttttgggagggaagagggaaggaaagagtagaatatgaagtcagtaaaacctggatatttagtgccatctttgttacttactagtaaccttatgaatattatttatattgttgatccttaatatcctcacttgataattttagaaaatgttatgtacttcataggatcatgggtagaataagaaagtgaatataagtaaaatccatcatgaagtacctgaaatatgttgtaaacctaagttataatagtaattttattgttgctaatatttcagaggaatagccaccaaaccagtactacttattatttatttctatttaacatataaaacatataatattctttctgagtggtaactttgaaaagggacaaaaatattaaaaattacattaaaatcatgtataatttataatactcctttcaaggttactaaagtgtgcatgtatttctaatcattcacaaatatgaaaatctatgtgtaaatttttaaattttctaaaaaattgacaaataaaaattgtattattgtcatggtgtacaatgtgatattgtgaaatatcacatattgtgaaataaacattgcggaatgactaaatcaagctatagaacatattcattaccttacatacttattattttttgtggtaagaacacttaaaatctacttttagtaatttccaagtatacgttattgttactaacagtagtcaccctgagttacaacagataactaggatttattcctcctgtcaaactgaaattgtgtatcttttcatcaatatctcccaaatcaccccacccccaggatctaataaccaccatttttctctgtttctctgagtttgacatttttagatttcacatataagtgaaatcatacagtatttgcctttctttgcctagcttatttcacttgacatcatgtcttccagttcaatccgtgttgttgcaaatgacaggatttctttctttcctaaggctgaatagagttccattgtgtttatataccgcaatttctttaaccgttcatttattgatggacatttaggttgattccatatcttggctattgcaaatagtgccgcagtaaacatgagagggcagatatctcttcaaaatactgatttcagttcttttggatatatgcccagagataagattgctaaatcatatggtagttctatttttaatgttttgtggatcttccatactgttttccacaataattatactaatttacattcccatcaacattgtacaagggttctcttttctccacattctggccaacacttttcttttgtctttttgataatagtcattctaacaggtataagatgatatcttattttggctttgatttgcatttccctgctgattagtgaggttgatcatttttttttttcatatgcttgttagccatttgtatgtttgctttagagaaatatctattcatgtcctttgctgtgtgtcgatactgatatgtaaaatatgcatacaaaatcaaaaccataatttatttttaatatatttttaatatgtcattaatatttttcagtgtaataggatgtttttcataatatttactttaatggacgcaacatatttcattatgtaaaagcagtttattctatttggggagatttcgtttcactttttcgccagagtgacataattgaacattcttgtcataggtctctgtgtttatctctgatattcccctaggaaaattcatagaagtagcattttggagttgaagggaatgagtaatcttaaggcttttaaagtagttttatcaaattttctaaactgaagtataaagacacatagaaaagtacacaaatcataagaatagaaattcagggatttttaaaaaaaacttagtgtatccatgctactaccaccaagttcaagaattagaacattacctcaggagcccctctcatgttccctcccagttatgagcctctcccctgccaccaccctctcccaaagataagcactcttttgacttctaacacctagattagttttgactttgaaattactataaacagaatcatccagtatatgcccttgtatttgacatgtcctgctcaacattatttttgtgatattattctatgctattgcctgtgccatagttagtttagtttttctatgtatggtattctattgtgtgaatatgccacagtttatccattctgctaatcaatggacattgggctgtgtctattatggggctattaggaaaaatgctggtgtgatgttcctgtcctttgctgcatatatgtatatatttatttttaatatacgtggaagtacaatggctaggtcataagatgtgtacatttggctttggaatcaccaaaaaacagtttttcagtgtggtcatttcagttcattttcaccagcagtatataagacttctagttgatccacatattcatcaagagtatgtattttcaacctttatccttttaaccatttaggtgaatgtgaaatggtatttcattgtgttttaatttgcaatcacctgacgattagtgccatttttatatcctcttatgtgaagtcattatgcaaatcttttgcccattaaaaataatagttgtctttttcttactgatgtagaagttatttggatacaagtcctttgtcagatctatgcattgcgaatatctttttccaacctaaactttgctttatttttttctcttaacaatctttcctgataaatggagtttgatttatcagtcttttcctttatggctaatgctttttatgtcttgtttaaaaaataatacattaacctaaaattgttgagatttttttctatattttcttttgaaaactttatttttttgccttttacattgaggtctgcaaacaatctagaatttatgttttgtgtatgatgtggagagtcaaggttcatgtttttcaaatgactaatcagttaacttggtgctatttactgaaaagatcatccttttccaacttaagtgacaccatcgtataaattaggaaacgctatatagatgatttgttctcacttcaatcccacacaggcttaattataataaatattcatgtctggtggcaaacattcttaaacttcgtcgttcttcaaagttgccttggatattcttagccctttgcacttacatataaatcttaggattggcatgtcaatttctactaagaaatggttgctgcaattttgattgagattgcattgaatttatagattatttgaagagagggcagatatctttacagtattggactttctaattcatgaagaaggtagtcctctatttgtttacattttcttcactgtctcagtagtgtttgtagtttccagggtagaagcttaacttttcggtctgaattaccaaattactagcaacatatatagtcatgcatttcttaacaaatgagatatgttctgaaaaatgtgtcattaggtgattttgttgttgtataatcatagagtgtacttacacaaagatagatggtatagcctactgcacatccaggctatatggtacagcatattgctcctaggctacaaacctgtactgcatgtgactttactgaatactgtagtcaattgtcacacaacaatatttgtgtatctagacacagaaaatgtaccgtaaaaatacagtatacaaatgataaaaaatagtacagctgcatacggtatttaccatgaatggagcttgcaggactcaaagttgctctgggtgagtcggtgagtgagtggtagtggtgagcaaatgtgaaatctaagacattattgtacggtaccatacagtttacaaacactgtatagttaggctgcactaaatttatgaggacacatttttatcttttttttttttttttgtatttttagtagagatggggtttcaccgtgttagccaggatggtcccgatctcctgaccttgtgatccacccgcctcggcctcccaaagtgctgggattacaggcgtgagccaccgcgcctggcccatttattttcattaatgataagttaaccttagcttatagtaacttttttactttataaactttttttttaagtttttgactctgtaataacacttagcttaaaacatgaacacgttgaacacccgtacaaaaatattttatatccttattgtagcagctttcttatttttaatatttttgctgtttaagcttttctgttaaaaagtaaaacacaaacacgcacatgagcctaggcctacatgggtcaggatcatcaatatcactgtcttccacttccacatgctgtcccccactggaaggtcttcatgggcaatgaaacattcatgaaactatcatctcataggataacaatgccttcttttgaactaattaagaatatagtaaatacataaaccaataacagttgtttattatcattatcaagtattgcatactgtacatacttgtctgtgctgtatttttatataactggcagtgcagtaggtttgcttacaccagcatcaccacaaacgtgagagtaattcattgcactgtgacatcactaggtaataggaatttttcagctccattgtaatctcataggatcacagtcagtctgttgactgaaatgtggtgaatgactgtataatagggctccaaggaagatcataaaattgcttgttttccagaactttgacaaagaccttttacagaaactaatataatagataaataatagtataacattgctgttttcctttgcatttcattgattactaactgtctggattttttcttgtttattggctgtttacatttttgtcaatttctttttatgttctttatccagttttccagtagatttttcctttttttactcattaaaagatttttttatatgctaaaattattaccctgtgtctgatatatgctgcaaatattcccagttgtcatttgttttaattttgattagtggctttaatttataagtgaatacgcatattatattcaatctttttatattctttttttgcttctaaaaggcttccccacgccaatattttattccagttcttcttactatttttatgcttaacactttaatttttctaaaatgttttgtgttatgaaatccatcttaatatgtttatttctaaaacagacacttttgcttatcttaatattaaaacatatacatttgaaattaacattcagagattgaaagaataaggaaagtaatcttgtgtgaaattaggtcaagatgtgcttagatactaaattaacacataagggaattgaatgtgtttgttttctttcaccacagggaacatgttatatgaagagcatggttttataatacataaaaggattattagaaaaatgatgtattttaccggtcaggtgtttgtgtctatactttgatgtgaatgcaaaatagtaaatataaatgtaaattaatttaaaacacatagaatctgatacaaaccttaatctttttccacgttatacattactcacacctgttatatttttccgtgaagtatttggaatactctcgattcctggaaactgttttaaagtgcagaagagcacaaaaaaaatatgtgttaaaagttcttgatttccacccaaccattaagtgatattgccaaagaaaactcttcagagcatttttcactgatggctttagatatgttataccagaataataatgattcattattaaaatatgcaaagtgtaatttctcaacaacattttgtggtaggaagatgagctggtacagtagttttccttattaaataattttttacaaaagtaattgacatggtttggctgtgtccccacccaaatctcaccttgaattatggtaatccccacatgtcaagggtggagccaggtgcagataattgaatcatggaagaggatcccccatactgttctcctgataatcagtaagtttcacaagatctgatagttttataaatgtgagttcccctgagcaagctctcttccctgctgccatgtagaatgtgtttttgcttctcctttgccttctgccatgattgtgaggcccccccccgccatgtagaatggtgagtccattaaacctctttcctttataaatcacccagtctcagatatgtctttgttaacagtgtgagagcagactaatacagtaatgcatttacattgttcaaaatataaaaggtacagtaaaaaatatctcaccctacccatcatctgctctaccctcactgcacattaaccttaattctagaaacaaatctacaaaataaattcctgggaataaaatttccaggtcaaagtttacatgctttttatagatatggccaaactgccttccacaagaggtacacaaatgtatacttcccaccagccacgtagaagagtctgcattttcccacagccttggcagcatagtgtacctgcagacttgaatttttgccagtgcaatagatgaagctctaattttcatttctctcattattaccaaggctaagcttctgttcatgcttttaaaatcctttgtattttcttttctgtgaactgtccttatcttttgtccaattttcttttgggttgttggcctttttcttattactttgcagaaggtctttcatgtgttaggaaaattagtcccttagacatgagtcacaagcatttatttttcataattgttcatttgtttttgattttgcctatggctcttttggtcgtgcagaagcttttgattttttatatagtccagtttactgatatttttgtctgttaattaaagttatttaacttgaggatacaatttacatttttttgtggttgactactatagacatatactgcttcttacattgaaaaaataataatcctgaatttggaaattgtttttaacaaacttttggtgaaggtccatcatatttaggaacagagcttgtttgacccagaaatcaaaggtcagtgagaaggagcaatgtaaatagaaagttaaatagcatgaggtaaatgttatgatggtgggaaagacaagatctgagaggataaacctaaagcaacatcataattaagctgaaaatttcgtctcatgataagctatcatttcattattccagatattagtcaaatctgacccattacactgttttctgtcaggaattgttttacctctattacaaggaagggatagtatgggaggatgataaggaaaccagcagtcttagttaaatgttatacagatttctgtgcttatatatgaagcctaaatgaaacgtgaacaatttcatgatcagataaaaaggagttcatcgctcagttttagagattttaggaaaatatgatggctattatctcagtagcttcagagtctagaggcatttagatgttgttagttgaagctgtaaaacgctttttacatctacttgtgagtagaaaatgatccaataaaaataaaatgtttagttacctcctttaaaatgcttgaaaaataagttgaggacatcattagatcatgtattacagacgtaggagtatatttgtaacatcacctacatcacacatacctgtgtgcgcgcgtgcgtgcacacacacacacacacacacacacacaagagttcagcaccacaggtgtagttatggatgtgaactcacaaaacacaaatcaagcaaagagaacaatatctcaattcatgattcatggacattctgtgctatctgaaacacaatgcttcttttgcccaactctcacccacacagggaaaggctgccaggaatgagaggcaagaagtgtgcaggtcaccttcaacaggagccaccacctgtatttcccatcagtcttttacaccattgtagtcacgtggatccaaggactgtattccaactgacagctcctgcgatgaggtgcagttccacacgacaaagccaggcccaacatttcccattcatcttaaagttagtgtttccaaggaaacagtgctgtgggagcctagggtcagtcccagactgacctgcaacagcccaggctggatgttaatcctttgcttatacagtctcatgaatttttcacaacatatatacatgcatttacaagacgtttcactgtacatattgtttacgtatacaatcttgtttaaaattcatttttctgtacattaattgatttttttctcgacaactttctctttttcatctcctaactcttgcatccaattaaacaatgtactgttcattagtgacttattttaaaagtatctaaaacaattgttccaaagcatgtgacattgtttatgtgacacactggtatattatctagtttatttttaaaatcttctctattattattcataatatattattatggaacagatgtatattataaaattttattcatattgcagtgtaatattttgtattacagtggtattgttaatagtctcgtaaagagctatcattacaagtttaaattctttattctgggatgccagttttaactcttgatattctgaagaaaatagctttactcttgtttattctggctctgtttttttgttttgttttgttttgttttttgttttttttgttttttttttgtagagatgggagtgttgctatgttgtccaggctggcctcgaactcctgggctcaagcaatcctcctgcctcagcctcccaaagtgctgggattacaggcaagagctacagtgctcagcctatcctggctctttatttacatgtaagcttgagcaataatcactgctacttaataactttattgtcattcattatcatgcagagtattgctctaaggtatgttcagggatgacgttactgagtcctaacagtaatcctatgaagcaggtgctatcattgtccccaatctacagaggaggcattgagagttagagaaaacttggctaaaatgttaggcaagaactagaaccagaattgaaatccaagtggcctaactctagacctcacaatgcttaataccatgtcatgctgcttcctaacctatttaatgtttttttcaaccccaacgtcatcacccatgtgtgatagtgggatcataataatatctatgtcgtagcattgttggatggattaaggaagtctacaaatgtgaaacttccaaggatgatggttggcatatactgatctcttaataaaaataacctataatcattctgttacagtctactctaatccaaatgttctttttacttctcatctcaaccacctgcttctgtttactaggactcacaaactatagctcacaaaaacgcataacttaccaattttccttgtacatgaagggacttccttttacaatcttccatgacataaaagaaagctagaagcaagtatagtagaagaaatgattgctatacaaacaaaattatagttggtttggttttaattttaggatgcgcattgaataaaaatcactcatttgggatttagaagacctgtgttatatatctggtgctaatgctgaataacttggcttattcatttttataactgcaaaggaagcgcgtatggcatataatacacaacacaccagtatatttagtaactgagtgaataaatgaaagatgtatttctttactttatcagttgcagttggctatgcctttgtgtaaggtgtgtgttttgaaattccaaaaaggtattagtttctttaaagcaaagaatttttgtagcaggttaatgaataattttgaatacattggttaaatcccaacatgtaatatatgtaaataatcaatattatgctgctaaaataacacaaatcagtaagattctgtaatatttcatgataaataacttttgaaaatatatttttaaacattttggcttatgccttgagaattatttacctttttaaaatgtattttcctttcaggtttccagagctttacctgagaaacaaggagaaattgaagctcaaataaaagaccttgggcagcttgaaaaaaagcttgaagaccttgaagagcagttaaatcatctgctgctgtggttatctcctattaggaatcagttggaaatttataaccaaccaaaccaagaaggaccatttgacgttaaggtagggaactttttgctttaaatatttttgtcttttttaagaaaaatggcaatatcactgaattttctcatttggtatcattattaaagacaaaatattacttgttaaagtgtggtaaggaagactttattcaggataaccacaataggcacagggaccactgcaatggagtattacaggaggttggatagagagagattgggctcaactctaaatacagcacagtggaagtaggaatttatagccaaggagcagtgtaggagtcagtagatggaaaattattaagaggaaacatcaggggtaagtgggattctggctaaaccaacctcacaggattcttgctgaagataggccagggttatcttatcagacaacccttggggaatggtggagaatactgagggtgatcaggtaccaaggataaagggttcttgtaaaactgacaggcttctttgctgaacctggattttacaggggagtgcaaagatgagcccaggcgaaggttcagaagcctgactaaagtttagtcaagcagggaatctttgtcatcatcatcattgttgtcataatgataataattattattattttactagaatatgttgctttttcctcagcatttactagaaataaggtcttcattaaacttatgttactagaatgcctgcatcatatttgttactgtgattcattttctatccctgttttaattgtgcttaatacatattcatagattccttatccaaaattgaagttgtttatgagattaggttcctaaaatataatgtctgggctcttttgtagacattgtaaagccctctcagactgactacactttacctttctatcttctcattctgccagcaatctccccgtatagtctggccacatcaaattacctggtacctttccatccatgtaatttcatgtcatacctgtgatcttggttttctctcttctttaaatgacttctttcagtttattttgatataatgaattttcttccattctttaagaatgaattcaaagtcattgcgtcttccaagttttcttccgtaccccaagtagagttagaatccctgttaggatttcttataaacctttttattcatctcccattgttcatatgttgatttacacttaaattttatacacctgagtatttcattacacatctgcactgttctttgagtgcagagggcattctcttatttatctctgcttctccactcatatcatacacactcagcctaggatccagtaaatgatgcttacttgtgagtgtttttaagtcaatgaataaagacagtaccaagacacccagaatacgaatgagatactgcaggtaagcgtaaggcttcagacaatcctgccaattgaacaccactatctccttcttctagtgtccttgtaaatgctgattgatcttcttttctccctttcaaggaatctattccaaagattctttcaatatgctgccccgttttgcgtctccttatttgccaaaatctttaagtagccaatcaaataaaccgaatcgttgaaattacaatctattaatgaatgtattgttgggcaacttcagagtaaaaaggataagtaacatttttgagtagttttttcttttatttaattgactttaattgttaaatttatttactgtccagtattgtaaaaacctaacattttaatctccatttagctgttgttttgctggaactgagagcaaagggaaaaggaagtttgagaatattctagtgaagaggaagtaaaagtttcgggaagatgggcatgagtaacaaggagatagagggaagtttgctacaactaaaatgagttagattagcaaaatgttctcgactatgtttaccttacttcctcctgacacttatgtctaccattctgatagctactcctcaagagcagatggcactgtggaagtcacaagtagacatcatttcactagcacaaaactcagcctgctcagccagtggcacagtcttgggttcagtctgatgattaaatttacgagacataataggctttacccagtaacaaatttagttagctttaagaaattatacaggatgggtaacaacagcctgcacattaaaggcacagtggaagtcttgataccaagacgtggcttctgatgtcccatcaccctgaattttagtcatacatgatcacaaggggcaagactgggtgcgtacaaaacacatcatcgtctcagggaagccatcagttctaggatcctgaccatttctccacttagctagtacatattgtactcagaggtgtttgactagctcctattcaccagtacaattacatctcatgaatactgatttttcactgctcaataaacaaccccaacaagaaagtacagttacttggcccaatacacaataaccttagccaaattctcaattatcttatatccagtatattcttaaaaagtaactggcgtaatattgcgaagaggaaaggtcataaagtctttcctcccaaccagaaatagctttttgtagctcacggtaaaagcacattctactcttttaaatgcaatctttggttaaaatgtgcctctttattataatagtttaaaaaatactcaatgctagctatctctcttcctggaacacatttaagaaaagatttttttttgaatcccttggtacaaatagatcctgtttactcaatcaaaatgacttttgtcccagtctgtgccccccggaatggttttcaaataatgaaaacctgcattgtgtcttcgattgtctatggcccatagggctctgccaaatgggtccctgcagtttgaagtgaaagccatactcggctgtgttaatcacttttctttatcaaagctacaagtcaccactcactgctgtgtgtagtttctgagagtcatgatatttgcctcctgcagcttgttttaaatcactgaggggagagggagctgcttttttcctggcagaaaactccttggcttcagtcctctgagcacattccgagtttcttatctctggagtgcagacttcaaaaatactcttttagcctttttcttctgcttgtggctgtgttcaaggtggggggaggggaaacataaaatcatagatttgatgacttgagagtttctcccaaaaattctcaaacccccagcttataattaggaaatggtgacctgtgtgaataataatttaccttgttttttatccctctttgtctagcttccattcctttcactaataaatgatttattaagattgcacagtttttctgatttaagatataggatattagtccttacagcctgctgtattcctctgcttaaaggaattaaactatttttccattaaagaaagatgggacactagactttgctttacttagtttcaaactactgaacaccaaaaataaaatttttaaggagttttgagcacatgcccttttttttaacacaaggtaaaaaaaaaaaaacacctttactaaaatcttaagaaagagttaatgcaaaggaagtagatatacgaacagccacgcccctagctccaaatcctaaatgtaaagaaacttgccttgtctggccatggtggccatagctgcctcggaaacaaagggtctgaggccttgccattcgggtagtttgttttctctagtcaaactctgagcacacctgttagaaaaatatgtaataccctctctctgtgagcctcagttttgtctgcttggtacttcactcttattgatgaaatgcagctagctgtgtagtgaaacccagataaaaaaaagctttaagggctgtgttctaatacattgtttatgctggagtgaaaattgactgcacattgcttggtttgtgcaatttactcccgaaatattcctattcaggaaatcctgcaaatagcaatattcatcttgaaaatcacctcacagaacccttagcaagctgagaaacataatcaatgagatcgtgatgtagagggtgaaaattaggcgtaatcacagccctttcccatcagtcagcccactagaaggcatgcctttgaattttgattttcaaatatactctcaatttagacataaaatatgttgatttcagatttcagaaatgataattgaatgctaagatcccgggaccagtttagaatttctataaagggtcttatgtttttaacctttaatgaatgctttcaataatgagctagaggtatactatttatctgacataagactgactactgctttccaaactttttattaaaatatgaggtgtggcgggacacataattttatgttaaggcttagtgactgaaatactttcatcttaatcacagggagggggttttttcctcccctcaagaatcactttccttctgtggtttataaataaacatgacatgtggctctgctggctcttccttgcagtataaggagcataattgcccataatgtcaaatccacactaaaaactaccaaaggactcaattgtagtgactgaccattaaagtcactgaacactgtgtgtgttcacattgctgtgagtgttgtcaaagaaaaatagcactagacaacagacaagaaagactgtgttcaaaacttttgcaatagaggagacagattgaactcaattctgctgaaataaaaggcaggagagcctctaagtgctgagatgagttagtgagaaagtactagatatcaggagggaggttagtcaatgtgcttatttaggccatctgtgtttgctgattggcacttatcaaagttagattcctatcctcccaacagaagactagcagattggggcactatcttttttgatgattctatatcaaagtgctagctcccaagtccttgagaaagtttattcctgaggtataaaagtggcaagaggctaggagaatatttttgtctcaaaaaagtagagaaataatatataaagttttctagagtaaatgctctaagaaaaggaaggtcaggtctaaagtcaggaagaaatctgtctcaaatgtagtcaaactcagggtatttttaaagctttctttgtcaaccctccattttgttcaagggaaaccagttttcccattgaaaaacttaggaacgccagttcatctagttcatttcagcaggtttctgttgttgaaggactagctgaacgaactctgacacttggtagtaatcagacatttcatgaaggagatttccatgaaagttagaaggaagacgaagattaatggttgaagcagactgcaaactcagtttttgagtccagagggcagcaagtcaaaaagattcctagaagctgggctgtaggcattctcagatggtagagtgaggatggcagtagcaatccgatggatttcttggagcatggcacggaagaggttggagtttactgaactttttgcatggcctacaaagcagcagctccaggcatgaaagttgtctatacataatttgctgtggtggtgagtcctttgtagtttatagcaagtcatccagcttctgcttgcagggcttctttagatattgtggggaaatggcagctataagacaacctagagaagagagtccttatctcagtaataatatgggcagtcacgttttagttctcagtgtcaccaagtcaggatggtgggagaaaaatttgaaatgttaatttggagaatcgcagccagattgtaaaggaaataaactgaaaattggtaaggacggacaaaatgtgtaagacagcaggatccagatcaatttacaggtaggtaaaaaaaaaaaaaaaaaaatcatgtcgtttacaaagaaatgcaaaatagatcaaagacaatgaacaggactagaatctgataaccccaagggttactgaaactctatctctaccatcacccttttgatcagtgttaatcaaagtaagactttccttgtttataaaataagactggcctatttatttatataggggtagcaaaaatggtaatttaccaaataggctattttaagtgtgattagctggaagttttcatgaagaatcacaagctgaataagtttcagagatatactgtacagcatagtgcctatagttaacgatactgtactgtacaattagaaatttgctgagggcagagtttaagtgttcttaccacaaaatactactactctcttttaggagcagtggtacataaggtgagaggaaacttttggaggtaacgcataggtttatggcatagattgtggtattggttttgtatatatactttatctccaaactcatcaagttctatgcattaaatatgtacagctttctgtttgtcaatcatacctcaataaagtagtttaaaaaatatgaaacctcagatttgattttttaaaagtctccaaagtttaggaaggcaagtcaagaacttgacatcagattttacctgaagtaaaatacctatagattcagctgaagtgttctgttttccaggttcctaaaatacccttggtttcctgggtctcctaagaatagaccttccttactcagttgtaagattgggaattctgtaagccaggtaccgggacagttttcccaaaaggggcttatattagctccatatagtcaagagtagctccttaaaactggtcacatctgactctatgcacttaattctcaaatatgacattccagtcaaagccttggttatatatttttttcaattatgtcttgttacctaaatatatttattgagcctatgcaaataattatattgccatgaaaataagaatactcggtaagaatttctgaattttacagggatcaggcagggataaaaagattaatgtttcattctgtttacaaaagcatactctaaattctcatgagttatagataacttaagagaaaaaggaaaggcgtttcttgtatttagcaaacagaacattaaaacatgaggaatattttaaacaaaagccataatcaaatcttttatcagttcattcaggcccatgtagttaattcttgtcttgcttgatcttgagttagtagtttcatgaactcatcagcttcttcacagagtttcataaatcctgactttgtccaatggtataatctcgaagttatttaagcaatggcatcagaagtctgtgtcccagagtacctgtcgtagtacttcctatgggtctcaaagatggtcctgttttactgaagatgatgcattctgacctctaactgattgtaagagcactcagggaagcatcagcataaaccaaaaactatctgtgaacgacaaaagacttaaaatggccataattaaagatctgattcattcgacaagaaattttttttttccctggtgccatgccacattttaaaataacaactggagttaggactgatgacataatattattatcggataaagtagcaccaggatgtgtcatggacacctagagcacctagagcactaacaaagttctaaggatttattataatttttcaagtatttatactaataatagttgacccatacaactataacctagtcaaggttcagcatctcttcttgtcaaagctttttatgcaactcaacataccaaatgaacctagttatttttaacatccttcattttacaagggtgcaggaacaaatcctttgaaatttttcaaaccaatctgagattaaaaaaaattttatttaagaattgacctgggaaaagcaaaatatcaaaggttgtaaaatgacaaaaggtttgaatacttggctgaataggatcattgctcactatgaaagaatgcatggctacctatgtaaccaagatgacaataaaagatttcaaaaataaatgtagaaggccacatgacggtaaaagtttttagttctttccaaagagaaaacactactttctaaaaaaattcaaggacatacaaaatcaacacaggtacttattctgataagaaacaatatttgtttcctatacagattacccaaaatataaaaaaaaaaacaaattttgcaatctcttattaagagaagaccaatagaaaagatgaaaatgttaattagtttgaccgaaataattgttttgcaattttgtgtgtgcgtatatatatatatatatatcaaaatatgttgcatacttaagtatattcaattttatttcaaaagagcagaccaataatccaagaatattttatcattttttaacaaaaagaaactacaactcatttttgatcaatacactgttgatactaagggtcatttgtaagagtttacatacacataaatccattccgttttagccagcattggctattaacataagactctccttccacaaatcttctgccatttccaatgttcattcagattttgtcctataccttcctcttcctcattttcacagtcattttaatttaggacaaagttattctctttttccttaacaaaaacacatccaacataccttgtatattttgcatacaaagttgtttccctttacccctaatgtttctggaagttttatttacatatattgattatatttttaaccattagtaagtcttattttatagagaaaactaggaattagctaagtgtgaactgtttgtcatataccagtatttcatagccaactagcaaagcttatgaatacaagttaaattcacctactcaatatgagggctaaaagtttacatcaatatttgtggaggagccttttaagattttcttttgccctgatatgtaatttatggaggctgtgttctaaaatttgagtaaatgactgaggagatacctagtggccatctgggtatctccaaatcccatctgaacgtacacggtatccagtctgtttccaattagctttttcaacctcaggtggttgcttctggggtttgagttttccagagcccccagtagtggcagggagcataacgctttagagaccatagagagttgagagactggagtaggaagagaaaggtctgtcatggatggacaaagagatggagcaggtacgggtttgaagaggaatatgctgaaggatttaagggagctaaagggaagatcaaaagtagtcaaaggaagaaggaggaatggtggtgatgggaagggagaggtcttagatgagccagcttagggagtgcttatgttttcggaagaggccattgaagttcatctttagtaaaaatcaaactaacaagaagagaagcctagtttgtgccatagaggtgaagcatctaatcagcagtagtcttcagaggaggagaaacagaatagtgagaatgtctcctggaggaaagaggcaccgaaggaacagcaacaacaaaaaaaggaaacatgaatgaggtctctacaaacgtgatctgtacagaaaatgatttctctaaatactgaaaatctgaagttgaaccaaatgagatttcaataagaattttccatgttctaaaccaatgatgcttttcaaacaaagaagcctgggactctagactcaagaatatactcagattactgagaatcaaaatctgatgttaccatgcttccacgctttcgtgggtaaggagtcagacttaccaatggattcccaattaatcagtcaggagtgtactcaacattcacaaaattagctttgcagaggttaatgtcattaaattcactttagaatggataattcaaattcaaatagtaactcccttagatagatgtgtactagctcaagttcacctgttatctgatttcatttttaaaaaaaattttttaaaagtggtgttcgggaggtaaggaacaaggaagagacctttagaaaaaagtttcagtgttttatattggatatgaaaatatcagtggaatgtgtcctgaaaaacactggatgacagttactggacaaaaagacaaattattcccttttaccatgcaactgaacacagatttattgaatgtttttctcctgagtttaggttgcctctgggcaagagtataattctggcttgataacaccttgaagcgtgtttgtttaagtttgtggatagtttcatctattagtggaattaggcatctgcttctctttatgaacactgggtaccataatcttcctcttactttttgttttttctactcaactccaaaaaccattgctgagttgaagtagaataataaggggaaagaaacaaaagactaagtttgaatcccagtgctgacacttactggctttacgatattgtttaactcacttaccctttttaacctgaccttcttcttcactaaaaatgaaaaattgagtgaatttccctgggactctgttagataaggcaaaactaagatgggaacacatttcctaaggcgtagaaaaagacagtgaatgggacctttcttgttgtatcaggagttatggtaagaggtactaacaataaaaattaggctttcagccaggcatggtagctcacgtctgtaaccctaggactttgggaggccaaagcaggtggattgcctgagcttgggagtttgagatcagcctgggcaatatagcaaaaccccatctctactaaaaatagaaaaaattagccaggcatggtggcacgcacctgtagtcccagctacctgggaggctgaggcatgagaattgcttgaacccaggaggcggaggttgcagtgagccaagatcacaccactgcactccggcatggggaatagagcaagacttctttaaaaaaaaaaaaaaaaaaaaaaaaggccttcaaaatacccctacagcagcaagttggtaccagaaaaacactccaaaaaagggagtagatggtcatgagattttcatcgttcaccaacctaacttgcccatataaggaaaaggataaacttgagaacagtttcttgaatgagaattcctggaacagatcattcaaataggactaacaatttgttggacatgagaaaacttctatgacttttactgttccctttcttatgagggaggggagaagagtgcttttcctctttgccaagccaaggaagagggcttcaaagaacctctattatagtggcattcagaccattgtatttataaaaaataaaaatattttagaaaattgaatatctgcttgcacattttaaagatgacatctattttctgcccttgggatacagtaaatattgacattttaaaagggtttatagtacagtttagaatgtatcccgtggaatccaaataccattgcaatataatgtctaccatcatatacttaaaaatacatgaaaaagctcatatttaataaatagaagttttatattattcctttttatttaaatcatatttttcaacttccccaatgaattgtattctaatgtgataaatatgtgatacatatttatgctataaagttttattagccactctatcataattctttataaaattatatttatgtggacttaaattcaatttttaaaaacaatttcctgtgactacaaggctctaagtatttttaaaattctctagattgagtagtatttaaagtattaataataaatacacttagtaataaccaaataacctaaatatatgtaccttttgataaataattattaaacatactcagtggatagttattgaaaatgaatctattatgagatggatgggtatttgatggtaccttgagtaaagaaggatttcagtcgctaatattttgaattgtacttttatttggcataaatgtatcttgactacaatgcaccagtgggataggtcagagaggtgtgcttttattttgtaaagcggaagaaagtctgtcattaaccaaaaagtgggcaagaaaattggaatgaagtgcctaccacaggaacaaatccagtcaaatcttttttttgtttgtttgtttgagacggagtcttgctcagtcgcccaggctggagtgcagtggcgtgatctcagctcactgcaagctccgcctcctgggttcacgccattctcctgcgtcatcctcccgagcagctgggactacaggcgcccgccaccacgcccggctaattttgtgtatttttagtagaggcggggtttcaccatgttagccaggatggtctcgatctcctgacctcatgatctgcccgcctcggcctcccagagtgctgggattacaggcgtgagccacctcacccggccgcaacatgctgttttaatgagcgcctgggtgcgggcagcctcaggcctaaaatggcgttagccccaagtgaggactggacaaaggttttatagtctcctgtaaacaggaagtctcctggcctgacgtaactgctgcattgtacccggatggcctctttctcgatcttcagaggtacttgtcttctggccggctctcttcctgcttctgctatttcgccggtgcatgctgctcaggcaagtagccttgtgccttaggaatgggcctgagaaaggaggagttactcatctccttaagctttcaggcccgggagagaatcttacaacccactgatgagttatgaaatccatttaatgggtaaaataaaatagaataagatagcatagggtaccaaagaatataacgcaggttattacattgtgttacgtgtggtatgcttaagtgttgttttctggaactgttgttatcatttgtattgtacttcatttttgtttcgaattttaagataatctgcacagttttatagaaaatgagttaattagtactgtatcagtgatgtcatactgggttaattattacaaagttgggggtaaatttatccctgtataacagactttaaagataatataaataggccaggcgcaatggctcacacctgtactcccagcactttgggaggctgaggcaggtggatcacgaggtcaggagttccagaccagcctggccaaggtgatgaaaccccgtctccactaaaaatacaaaaattagctgggcatggtggtgagtgcctctaatcccagctactcgggaggctgaggcaggagaatcccttgaacctggaggcggaggttgcagtgagccgagattgcaccactgcactctagcctgggtgacagagcaagactccatctttaataataataataataattttgtttatttattgaatagatactttcttccagtacaaaattcaaaagcattgaaatcctctgttgcattgttgtctttcagccacacagtttctctccccatgtgctgccaaggttttcagtttcctgggtagccttccaagaataggatgtaggtgtgtgtgtgtgtgtgtgtgtgtgtgtgtatattattttctactcttgtcctcttaaaataaagccagctgttagaatactataaatactgtttctgcatccttcaaaagatggttcttttgaagcccttttccttggcttggcgagggcagaaggaaaagcactcttcttcctccttcataagaaaggaaagactaaaatgcctgtgtgtgtgtgtgtgtgtgtgtgtgtgtgtgtgtatagcactcttctccctcccttataagaaagggaagagtaaaatgctgtgtgtgtgtgtgtatatatatacacacacacacacacacacacacacacaggtgattattttctgtattagtagttaaagaactgtctctttttttttttttttacagttgcatactattctgttctaaggatataccataattcacttaagcagcactccaattagtgagcctttagtttgtttcgacttttggctaagataagaaaatgtataactttgtgcacatcattttacacgttgcaaatatatctatgtgataaattcctagccgtcgaatggctgcgtcaaactggcatttgtcttgttagtacattttgccaaattgctcttcatagaacatctcgtcagtattaggaaaggtttcttttccccatacccgtgcccactcagtgtgttatcaacctttttgatcttctaaacaagaaaaatggtgatatctgtcattttaatttgaattctttattcattttgtgagtgaatttgaattttttcatgtgttgcagaatcatttttatttccttttctatgcactgtttgctacttttttgttttttgccaatgttctcttttgggttattggtctctttcttactaaggcaaatatagtttacaacttgaagtaaaaacatggttttctatgataaaggttttaatgaatgttttctacaacagacagattctagtcttaaggttataacctgaaaacatcaaaactaacctttgaattgcataggaatggtctttgctcttcttagccatcaatcctggacagaagttcaacatgatgacaaattgtagcacaagtagagatttaaaaaatttttaactaatatgtaaatatttgctttcattttcttatttatctaacaatacattgatggctagaacagggtttgtctttgcaaagagcctgtgtcaactgactcccattctttcaaaatacattacctaaagaaggtttgtggcttctctttgcattgcattttctagccaaatctgaaataactatctggaagcttaacattttattcccacacttatttttccttgtgaaaatcaaaactgcactttcccagtcttcatgagtaaccacaatggtttgccatttgacttgccagttgtattagcatactgagatgtaatttatctgcatcaagagagttaattctgagcagctgggggctttctaatctctttacccatcttggacaccagttccctctcactgctatttgttttattctttgcagttagaataccattcctcttgacatacaagaaacaaacccaatagaaattaaaaggttccaatttctattttccattcaccaatattataccattttctcctaaagcagttctactctctcctagatcattctcttgcttttgaaataaaccttaaaaagtcattttgtcaccctaaatatgtttatactttcttgaaataatgcttttactgcatattagaattttagtttttacttagcagtccttcactactcctttagaaggaaatttagataatactttgaaggaagttatgagagaacgtcagaagccatgctatcagttttttttttttatgtactctaaagaaaactctgctctgcccatgggtgtcatctctttctgattctgtgtggaggagaaaaatgggaacacttccaatcattttcaaacaatttctgcttaagtggatgaatggaccacctggtttactaactataatgcccaggggatggctttgattggcagacagaacgcggtgcagaaacaatggaagttaaatgaggaaggttttaaacttgcaagttacctcccttggtggcattgactgttggtagaaaataacacgttgggatttcagatacattcagacatgctctgcacttgcaatttgcaatacttaaaacaacacaattcttctaatcataactttttaaaaaatttggccacctttctccattgtctcataaagctatattcatgaagctgtttattcacaaagtcgtatcatttaaagataagtgttatatccataagtatgtaaatgaattaaaatctgggaggctaacacttatccattccttattctactatatcctatctagagccatgcttcttaaaatttaatgtgaaactgttatttctggtctgtggaaccacagtttgaaaagcactgtcatagattcttaagtagatacattttcatgcatacaataaatatgcaggagaagttaaatgggtatgtccgggagtcaaatattgattctcagaatgaaaacttcttcatttatttctcagtgatcttcataaccctttcccatactgggcagtgagaaaaaattatcatctcactctgaaatagtgatttcaccagtctctttttatgggttgggacctcatggataatgaccagtcttttagatttccttgctctcctcctgctcctctccaaaatggcagctgggttgacagatgaggaagcattatacatgacctgagatctctatgcaggtacttgcagtctcctctgaccctctgctctctggaacagtgcctcttgtctgcctgataagtctctaccctgctgaccttgtggctctgagcttgtattttcatcaggaaatacggttctctgctgactatatcagttactaaagggattcttaaatctctgagttactgctgaagaacacttagaattctaaatttgtaattatgatacctctaaaaacaagcgtgattatccattatgtataaggatgccttccaaaaagttggagcaacttgaagccacttgttacattgtcatttagtggaggagggagtgaacttggtgtttacaggtagaactctctatcaggtgctgtgaggaaaaacaaaagcaagataaactgtggccataatctttgttactttatttcccaatggggagaaaaagacaaatatatatatttgtcaaaactgaacagatgttatttgaacattatactgtatatgccattataactataatgtatataatacatatatataaattattgaacactaaaaagaacactttaagaattatctattttattttttttattatactttaagttttagcattaggagaagtatctattttaaataaagctatttcactcttcagtttccatctcaagaactcataccaatttaaacttccactcatatttgagagttgagaaaaattaccaaatgataataatatattatctaaaaaataatttaaagatgcatgtctctaacaaaactatgtaacattctgaagggttttaagtaatacttcatatatcctaattcagaataaacttagatgttatcagtatgaaaatatatcataaagtaacatgattctctccaatgaagatgtaatcatccaaactttatgcgttgaatttacggcttagaaatgccatagcaatatgtcctcttgaatatacaattctatatactgagatttcacttagtatattaagttctgtatcactgaagagtatattatgattctaattaacaaatacaattctattttatataagtacccctatcatctactaggcaaagttagctgatgttactatgcatttttttgtcagctgtactcaacttataataactttgtattccaaatacttcaaaattgccatatgcttactgttttcctattcacatcattttcccccctattcttcctgaccctcctttgagcaatagtgtcagtgggattagactcatgcattcacatactgaatgaatgaatcagtatgtgattcatgatatagaaaatttaaattccttatatatttcatatatcatatatatgatatatgtatctgtgcatataggggatattaaacacttctctgtatatatctgacatatattttgaaaaggaaacaccgtagggccaagttaactgcttcaattattacttagtgtaaatgcattcagtttgttctgtaatttcaaaatgatacatataaaaaagtagagtttgcatgtttaatacatctgaagctacagtttccaaattctgaacactttggtgacccccttgacacaatgaatatttggcagttaccgaacataacagggcacaaataatatagttaatgaaaacatccataattatttaaattaggctattttaagaaaagttttaatttgaacattaaacagcttaaaatcatttataataattgattatgtaacatgctggtcattaaaatgagattggtattctctttttttttttttttttttttttttttttccgaggtggagtcttgctccatcacccaggctggagtgcagtgctgcgatctcagctcactgcagcctccgcctcctgggttcaagggattctcctgcctcagactgccaagtagctaggattactggtgcccaccaccacacccggctaatttttgtatttttagtagagacagggtttcaccatgttgaccaggctggtctcaaactcctgacctcaagtgatccgtcagcctcagcatccgaaagtgctgggattacaggcgtgagccaccatgcctggccaagattggtattcttgacattaataattttggtaagcattaagaaggcaaaacatggaagcactcacaataatgtataggatccaagtaaaattctccttactgaaacatgaaactacaaagccatgtgcgcatacttttaatttttaagatttgtttgaaggaacttttgtgaatgacaagtagagaaagtgtggatagatagcatctctgtctttaaaattatttgatgaaataggtgataagaaacacaaaaattaataattcatgtgacctttattacaatacgtcttctggtattagcatagtaataagtattagtgatttacataattggagagataacacaaatacaaattatgcacacacacatacatacatacacgttcctgtgcttcactcaaaactgaacagatgttatttggacattgtactgtgtatgccattgtaactaaagtccaatttgttagagatagtattgttattttattatctttagtatcttcaatgagtccattatgaatagtagcattaactttgcttatgactagcttaaatagaactttggactccataaaaatacgaacaaagatttttaatggctttagaatacagaagtaatctggtaaaagtattcttgattttaatagaaaccaaacaatcaatgtgcccgttagattaacagtgaataatcagattgttccagctcttcactaatgaacaatgctgaaacaacattctctgtaggtctcctcagatagacatatgagaacacctagaagtggaattgttacctcattagagtattcacatttttaattttatcatatattgcaaattgcttttccaccagcagcaagaagtggcaggaatttattattttaatttgcatatccctggttgaacaagttttcaagtttgttggacagatttttccttctgtgagttgactcttcatatatttaccccaattttccgttggattgtttactttctcttaccgattaatatgagttgtctgtatattctagattctagtagagttctggattatatgcacctaatatataagtctacaattccttatccaaaatcttatcgttgacttttcaggagactagtgaaaatggctacttagtggaacatatggaaatcatgagttataagtgtataaaggctaagtgcaacagtctaaagacctggtatcacagatgaagactgacatattgagtaaaccaggaattggctttattacataatgtgtcctttttcttgatttcagaaacccatatatttgctgtttcctgtacatgtttaggaagagtattcagaagagagaatgcagatatattgttgctgtttttttttaaaaaaatacgagtttaattcaattacccatttgattgcttgagtttattagttatggtagcacttagaaagagttgttttagataatgactatgattttggtacagaacctaatagtaaaaacaaaacatctttaattttatttaaagtgcatgtcagtcatgaagtcagaattgaattgctcttttctttgcttttaatgaaaattagcctaatggctgttttatctttaaaaagcaacttctagtgtttaataataacagatttaagtaaatattctgttaagacttaaagaaccatgtccaattactatatggataataacttagagatgctctatattggtttaaaataatgcaaatatcactggccactattcagagatatgtcaaaatcacttttgtttaatatgtgcctttctagtccttagatctactgtattccctaatccttttggggtatataatccagagatattaggacccattcagccagaaactgaaacatgccatgatggttagaattcatcagaaccacactcaaatgaatgttaagagacatagcgtgataaaagtgcatctgaaagagtatatgaacagatgacattacatacaatgttgtatataagagaaaggaaggaaagacattcatatcatgtcatattaattcatgtacactgaaaatacagaccgtgaacagacattctttcatttgttccttcatgtattcaataatagaatgcttctctaccacagatgattccaggggaatttggcaattgctggagatatttgtggttgtcacacatgggggaggagaaagtgctactggcatcttgtgcatagtgaccaggcatgctgcaaaacaccctgcagtacacagggtagctcccgacaagaaataattatccagtcccaaatggcaatagggctgaagctgagaaaccctgattgaaactcacattacatcctaatcgaaactactttgttccgttctgagccgtaggattcatcaaataaaacctactttttattggtacaatatttaaatccagagaccctgtagcatagtaattatgtatgcaggatttgcctcagaaagactagggttcaaatctcagattcaccatatgttaggttgtgccctaggcaagtttctgacctttcgtgactctagttttttaatctgaaaaaatggtaatagtattgctgagaggctctgcaatggagattgagattaattaagatgatttatgttaagtgcatagcagagtgtttgcacttagtcagtttccaacaaatggtagcagtattacctttacatgtactaaatcatttcatcctgacctactatgaaaagcctgatcactttccatattttactgtttttaagataccattgattagagtatgcattgttattttatttttcaccaagaaaaatgtgctgccgttttagactatgacacgctatcatttataaaacgtgtcccaatttcagagcagctaacctgttgaaataaaatgtgagtcttataattgattattgtaaaacacaacagtaagtcttctttgattaggtgcaactgaacaatactatgaccacattcagtagcaaaggcacttagaaggatataggaatatagcttagcaggaaggtagcatcgggtatctctctttagtaggatgagtatgcgtagcaatctctgaagcacccagggagccatccaagagctattcactttgcagcacctgtccactctctcatgacatctcaggtgcacaggaaggaaacaaatcgagatgctgggtcaaccctggcctagaagccttatgcatcccagaggccaatgccttgtaacatagtttccaaggtcctcaaaaaggacatgcttagttacaagaattgttgtacttggggacgccccacaattatggttttccattaggtatttatagttcatatgtagaacacctaaccaaggtgtaatttaccagtccccatcatttttttttttaatctgaagcaatgttgcctgctcacacatttgacattccaactttatcagttttctagggagaagggagctagaaagttgatcaaagtacaaattctcatacagatggacaaagggtgtttttaaccctttactcacagtaatatctgttagtttcatttattttatatttaaagatactgaaacctgaaacttagagcagttaaatgacttgccccaactcatgggctaataagcctagaacccagatgttcttatttctagactgattatttccaacaacactgtaatatcctaaagcaagagtcagcaaactatggtccaagggccacatttagtcctccacctattttcagaaataaagagttattggaacacagccacatttatttgttcatgtattagacctgactactttcatgccacattggcagaatttgagtttggcccacaaagtctaaaatatttactatatggtgttttatagaaaatgtttgctaacctctgctctaaagtataattacaaattggccaggtgcagtggctcacacctgtaatcccagcactttgagaggccgaaatgggtggatcacttgaggccaggagttcgagacgagcctggccaacatggcaaaaccccgtctgtactaaaaacacaaaaattagccaggcttggtggtgcatgcctgtaatctcagctactctggaggctgaggcacaagaaccgcttgagctggggaggcagaggttgcagtgagccgagatcatgccactgcactccagcctgggcgacagagcgagactgtgtcaaaatagtaaataaataaacaaataaattctaattataaattgtttaactctttctatgagtctatataaggagtttatagaaaagcatttgtttctaatgtttgattattaaaaatacccctgtattttttattttattttaattgacaaataataagtacatatatttatgaggtacaatgtgatgttttgatatatgtttacattgtggaataattatgcatacttgaaggattttagagccacagagcctgaacctaaccgtttctctacatcagtgttggccaacttttttctttaaaaggccaaatagaaaaatttcagtcagtttttgaggcttcatgggccatttggtctctgttggaaatagtcaattcatgctaggattggaacctagataaccagactcaagagcccatactcttcaccagtaaggacttaggaaggcagcaagacctgggagtaccagtttaaatgaatgttcttctaagcagtgtcctgtgctgctattaaaccagaccagagctttggcccttagttaagaactgtatgtataaagttttccaaaataatggcttcaggttttcacaaagtccttccatccaaacaatgcagattgtacccccttaagaatctgttcttaactgccatctgttctctgcattcttaaagtctaatcttaatacagcagccagaatgatctgtttaaaaataagtcagatcacatcactcctctgctgaaaactctcctatgcttcctaatctcactcaggataacagccaagatccttccaaagatgcaggacctatcctcctccatccccaactctatgactatcattcctactactctccccttgctcactagattccactcaccctggtgtccttttttttttaattgaacatacacatacactcctgccccagggcctttgcacttgctgtctctgcacagattgttctttcctgagatagctacttgaatcgttccctcacttccttcagatctttatttaaataccacctactcagtgaggctttccctgcaggcactttctaaactctccacatgccacctccctttgccccatacctaagtctcttattcctatccagtgctttacattttgttctttagcacttttcactctccaaagcaccttaatttctcttttactacacattatcaccattagaatgtaagttttatgaggacacaaaaagtttgtctgttttattcgctgttacatatctagtacctcaaacaatgtttagcagacaataagtaatctgtcaatatttatggaatgactcaagtgattttttggaagagttttggtaatatttcatttgccaaaagaattctgccaaaaagactttgaaacccccactttaaggtggagagcttccatagaggcttctggatgttacttgatggtcacacctatgcccactctttcactggccttgaacatttcaagtatgcagcttagtagattatatcttcacagtttcacaacactttccagtttaaaaatcaatgctgcattatgctttgtatatttggacagattatttttgaaatccataaatctctaagttttttttttttaagtctccctttggtgagctgcccttgattagttcaaaatgggaagagagaacctgtcattctttgtcaatcaggttggcacgtacttgacagcatgcagttatagtgaaagagagctgtgttgcagtggtctagcaaacctaattgtagttaagtaaaagaacagtcacccaacatgagaggaaagacaaagaaactcaactgaacaatgttgtgtttttccatccatcagccttcatttgtcagagtctgactgacaatctggactgcagaaatcaggctctaacacaatattgattccatttcatattttgtttcttgctacactttttagcaaacagtttctgtatggaatgagagatagtgcagtcaatatatgcgaccagggcacatttatattaaaggcttactttggtttttttgtcccagaaatcacatattgtttgtttgttttactataatattgtaattgtcagctcttgctgcagtaacaaacaatgacaaaattccagtgacatataacaacaaacatttattactcactcatgtgtctgcagatcagctgcagctttactccacactatgaatcaagttaaggtcttttcattctagaatatggatctgctctaaatgtcttctcatcccaggaccctagcggaaagagcagcttttatatggcatattattctctcatgatggaagataagaacaaggggaaccagcaaatcttgaactgcctttaaagttccagctaagagctgccacacagtcccttctgtctgtccatggtctattggtcaaaggtacacagtcaagcccaaagtcaatgggaagggaagtatattcactgcagggcagccatattaagagaggaaatgaataataatgaactgacaaatcaaccatagtatccacaaatgtcttaggatttcattgattcccaaatgcattttttagtatttcaacacctctgaacttgagatatatcgtacaatagataatgtttacaaagtgtaggtttttttgttttttggctttcttagtttacataacaatagtggcccttatcatcaatgatagattagatagaaaaactgttaattgtggggttgacaaaatagccaaatggtagaaggcactccttataagtaagtaagttatgagtgggagctaagtgatgagaacacatggacacatacaggggaacaacacacaatggggcctatcagagggtggaggttgggcggagggagagaaccagaaaaaataactaatgggtactaggcttaatatctgggtgacaacataatctgtacaacaggccctcatgacacaagtttacctatgtaacaaacttgcacgtgtacttaaaataaaagttaaaaaaaattaagtgaatggacacttaatgtttacaaaaaagttgtcatttttatcttgaatttcttttttctgtagcaatatttatatctcattcagatcagcttatttgattagaaaaccaagcattaatagtagatcttatgtctatttattcacatattcatataccttcatttataaatatatattcatatatatttagaagatcaattggaaaacataagtgccattcccttatttaaaactcttgtagcttctccactacagttctgagggtggtatacaagatccttcttttctctggcttttgctttctatttctactccattacttcccattcccctacgtgatagctccgtacttcttctgcttcctgtctttgcatgttccatgttccctcttggaatacattctctctgccgtccatccccttataatgaggtgcatgagctgtttctgctcccagcctttctgtcctgaccttcttgtctatcaaacacaaaagtgatcagttcctgctctgtgctccattatacattgcactttactagttgttatacctgacctgctctaaatgtagtatatatttgtgtgtctgcactccccattcctaccccagtgaaacatagtaagcactgaataaatgtttgtcgaatgagcaaataaataaataaataaataaataaatgtttgaacatacatggaaaggttgtttatgtcctccttataatgtgctttgagatatatattcttaatatatatataatcatatattctaaggttattagtaggtaaaatgaaaatttaaagaaattgagtacaagaaaggaaaacaaggaagaattttttcctttttgtactatttctaagaacaccaaatttctagttaaacacacgcacacacaatcggcatgatgtagaattagaaatatgttgaataaatcaattattagaaaatgtaaatatatattaatttgcctctgacttgctacttttaccctcaagggttttttttttctacctcttttcatcactaatctttgcttcactgcttgtcagatcagcaactgcccattattagtaatgccatttaataagagataaataaaagtaaaggtgcttagagttactccatttcaaaaacctatcagggctggatttcagaagagaccatgaaattctcctactgttattgaaccattactccctattacctaattaatacaagttattttcttaaaattatacctgacattgtagtgaactatcaatactatgaagaaaatcaaactctcctcgtatcataaggatcttaacacctggtacacaatcttgcattggaggggacattaagaataaggcatggaggaaaaaaaaaccttaatggaaatgttctgttattagaaatgagactttttggtggaaatcccatgacgactttcttgtctgaatgttctttgaagttgaacactttctccttacacaagccggccactataattagctatgtttccattttagtggtggccttcttcaccttatctgaaatcatataaagatgtgaggccatttgcgagataaaaggtttgctcaaaccagttctctgacctggatatcagaggtttggcaatcataaacccactaagagaaaccctcagagctattacaaggctatgtaaaactttatttcattttttgtgagaagggacaggattttctctcatttatattctggaagaatattgtagaatgtatttgagttcaagaggaggagaaataattaacataatattaagaaacgtcaattttggaaagaaataataagcatatatgcacatgtgcgtgtatgcacacacacacacagtatacacaacagattcagaaagaaggaaatagagatttggtgacacatacttcctggatataatctcaactctgccatttgcaagccacatggtcttggataattgacctaatctctctcaattgcagcatctgtgaaattagataaaactttctttgtaggagtgtatgtgtgtatgaaaagcacagtgtttgacatataataaatgttttagcaactgtagcttgttaatattatcacagcagttaatatcactatagcagttagttgccattttcagcacagctaataattttagtagcattttctgatctttccatctcatgtggtttctttggagttgtttcttgctttgttttttagcttttctatgtcacattttatttgcatggagaaataacaaattttacaatttatttcacatattctttaatttttaggataattgtcagtttcttacagtttattttccttatactcactgaagaaaatatgtacgaaagaatattttcagtgaagttaattggatttactacagttgacccttcaagcaatagtatcttgcccttaataactgacctatctttgaactaataaattcaacctgcaaataaatgtagtgaggtaaattgtagaaatttatcttcaaaatggtctttctaaagtgatctatcaaaggtgcatttaattagaggtccagttctccaaaaatgtgccaaggaaaagtagccacaaagaatttagagctgaaatgaattctttcacccattgctctgtttctatagaactgagaataaatctcatatgggtacttaaaatctgtactatgtcattgaaggatgaaaagatgacaatagtgatgatagaaggacacggtaataggaaacatttcaatagagggaaatgatgtgagtatgcaatgttcattcaccagaggactaaatctagggctattttggtgacttgaacagggaatattctacttcctgcaagtgaaaaatatggacatttcatttggcatgccacctgctcttcagtccatcatgtagcaagcacccacttagtactttggagctctaagtaatacttggactactcaaatgccagccttgttgccatttctgtttattcgccaataacaattttattaattaaaatttgtatgtggatgtcttaaggaaattccttgtagttgtcaaagcagactcctgatcctatctatctgccagtgccttctgagtagtggtatctattcttcatgatttttggaactatttatgggtgattgaagaatatggagtggatagagaaggatgctagtcatttggctgcacacaagaaacacagatgaaatttttgactatttctgttcattttctaaaggtacagaattttcactggattgtacttgtaagcaattttaaaggaagaaatatccagccttttgaatttgttacagtgttgcaagacttttttaaaatgttaagaatttttatcatataggatgaattaatactctcataattttaggtttgtttcttccataattaataactatccttaaagattgtgtgtgtgtgtgtgtgtgtgtgtgtgtgtgtgtgtatttcttgattttccagagcaaacgttcccattcatttgttttactcaccttgttatagttgctcccattgtaagatatatctagtaagtttactgttgttacctaaatctgtttgctgaattttaaaaatgggaacatgtagtaaatttgggggaccacgagctagtatttacaaagtaaaccgagaacattggatataaaaccttatttcatttaacctccaatgaaggatatattcagtattattatttgtattatttcttgagcttccttgcttatctgtaatatgtaacatggtggcaccccttttcatataattctctcctcacttctattttgggtttttacatgttcttgtttcagtctcttctgctctttctatcttttcttggttcaactttcttctcttatcctgtggaggcgaatacctaattctggctctatcctcttcagtcactctacaagtatcactgggacaatattgtccaactactatttttacctccaaacctgtattcttagccttacccctaatctgcacactacgcttctttttgcaattactttctgtacatttgcatcagtgttaatcacaggcatcttgactcatgtctccaacctgaaaacattattccttccatatagggacaggctcctctgtcttccctgtacccctagacagtttctcccaagttataaaatcttggtgattctgaaaattttctttttccccatcaagtcctgccagtcctttatccacaacataggaataatacttcctgaacatccgtgctgctcctgtttgttcaataagtactcggacctctaaaggcatttcctatgtttcttccaccagccccttatccttaaaatcttgcctccaatctgccgctagagttatcatcttaaaagagtcaaatcagggttggtatccaagaaatattacaaagtactaagctcttggtatatacaatcaacttgagagaaagagagggacgggaggagagggagagagagagagagagagagagagagagagagagagagagagagagagactttattctgtcctctataacacctgaatgattctgtacatatttatgttaacagagcattgtactacttcaaatccttatacaagcaaaactcctcaccgccttttggcaatggaacttgcttttccctctgcctgaaatagtcttcagtatgttgacatgactcatttcttcacttcattccatttcctgaagagaggagcagtcttctgtgctcacattgcctaaaatagagcccactgtcactctctacttactctttttaatctttcttcatagcatacatatacatatatatacacacatatacatatatatacacacatatacatatatatatatatatgtatacacatatacaggcatacctctgagacactgaaggttcagttccagaccaccataataaagtgagtcacatgaactttttggtttcctggtacatatagaagtcaggtgtacactacactgtaatctattaagtatacaatagtgtatgcctaaaaactaatgtacatgccttaatttaaaaatatgttattgcagtgttcaagctgagagccaaatcaagaatgcaaactatttacaataaccacaaaaaataaaatatctaggaatacatctaaccaaagaagtgaaagatctctacagggctaactacaaaacactgctgaaagaaaccatagataacacaaacaaatggagaaacattccatgttaatggaaaggaagaatcaatatcattaaaatggacatactgcttaaagcaatctacagattcaatgctattcctatcaaactagcaatgtcatttttcacagaattataaaaaactatcctaaaattcatatgaatctaaaaaacagtctgaagagtaaaaacaatgctaagtgaaaagaataaagcatgatattaaccaacttcaaactatactataaggctacagttacccaaagagaatgggacttctacaaaaacagaaacttggaccagtagaacagaatagagaactcagaaataaagccgcatacctacagccatctgatctttaacaaagtaaacaaaaaaaaaaaaaatggggaaaggactccctactcaataaacggtgctgggatagctggctaaccgtatccagaggaatgaaactggactcctacctttcactatatacaaaaattaactcaagatggattaaagatttaaaaaaataaaatctcagccaggtgcggtggctcacgcctgtaatcccagcactttgggaggctgaagcaggtggatcacgaggtcaggagattgacaccatcctggccaacatggtgaaaccccgtctctactaaaaatacaaaaaaattagctgggcatgctggcgcatccctgtaatcccagctacttgggaggctgaggcaggagaaccgcttgagccagggagtcggaggttgcagtgagcccagattgcactgcgccactgcacttcagcctgacaacagagcgagactccgtccctaaataaatacaatacaatacaataaaatctcaaactagaagaatcgcagaagaaaacctaggaaatactattctggacatcagccttcagaaagaattcatgactaagtccttaaaagcaaatgtaacaaaaccaaaaattaacaagtgggatctaattaaactaaagagcttctacacagcaaaagaaactatcaacagagtaaacagacaacccacaagatgagagaaaatatacacaaactatccatcagacaaagatctaatatccataatctatagggaacttaacaagcaaaacgcagataaccccatgtaaaaagtgggcaaaagacatgaatatatagatacttctcaaaagaagacaaacgggtggctaacagatatgaaaaaatgctccacatcactcatcattagagaaatgcaaatcaaaaccacaatgagataccatctcacaccagtcagaatgcctattatcaaaaactcaaaacacaatagatgttggtgaggctgcagagaaaagggaacattatacgctgttggtgggagtgtacattagttcacccactgtggaaagcagtttggggatttctcaacttaaaatgcactgtcattcaacccagcaatcccattactgagtatatatccaaaagtaaataaatcattctaccaaaaagacacatgcacttgtatgttcactgcagcactattcacaatagaaaagccaaggaatcaacctagatgaccatcaatggtggactggatgaagaaaatgtggtacacatacaatatgaaatactacacaaccattaaaaagaatgaaattatgtcctttgtagcaacatgcatgcaactggaggccattatcgtaaatgaattagtaggaacagaaaaccaaataccactttgttctcacttataagtgggcctaaacattgggcactcatggacataaagatggcaacagtacatactggaaactagtaggggaagagataaggaaggggcaagagttgaaaaactaactattagatacggtgcgcactatctcagtgacaggatccatcatactccaaacctcagtatcacccaataaatatataaatgtaacaaacctgcacatgtaccccttaaatctaaaacaatagttgaaattatttaaaaaaatactttgttgctaaagcttgctagcagtcatctgagccttcaatgagtcttaatctttttgctgatggagggtcttgccttgacggagatagctgctgaccgatcagagtagtaactgttgaaaggttggagtgactatgccaatttcttagaataaaacaaccatgaggtttgctatgttggttgatttttttcacaaaagatttttatgtagtgtgtgatgttatttgataacattttacccacagtagatctttcaaaaatgaggtcaaggctctcataccctgctgctgctttaccaactaagtttacagaatattctaaaccctttgttgtcatttcaacattgtttacagcgtcttcaccaggagtagattctgtctcatgaaaacactttgttttgctcatctataagtagcaactcttcatccattgaagtttcattatgagatgacggccattcagttacaccttcaggctccactttattctagttctcttgcaattttctccacatccagtgacttcccctactaaagtcttggaccctcataggcattcatgagggttggaataaacttcttccaaacaccttgtaatgttgatatttacctctttctatgaatcacaaattttcttaatggcatctggaatggtgagtcctttccagaagattttcagtttacccagatccatcagaggaatcgctacctagggcagctatagccttacaaaatgtactttttaaagaataagacttgagagctgaaatgactcctttgtccaaggactgcagaatggatgttgtgttagcaggcataaaaacaaaatctcttggtacatcttcatcagacctcttggctgaccaggtgcattatcaacaagcagtaatatattgaaagagattttttcttctgtgcaataggtatggccagtgggcctaaaatattcagtaagtaaaccatgctgtaaagagatgtgctatcatccaggctttgttgttccctttatagagcataggcagagtctattagcataatcttaagggccctaggatttttggaatagtaaatgagcattgtcttcaattgaaagtcatcaattgcattagcccctcaaaagagagtcagcctgtcctttgaactttcgaagccaggcattgacttctctctagctatgaaagtcctagatggcatctttttccaatagaagactgcttcatctacactgaaaatctgttgtttagtgtagctaccttcatcatcttagatattagcttgatcttctggatagtttgctgcagcttctccatcagcacttgttgctccacctttcacttttatgttacggagagggcttcgtcctaaagcctcatgaacaaacctctgctggcttccaacttttcttctacaatttcctcacctctctcagcattcatacaactgaacagaattgggccttgctctggattaggctttggcttaggagaatgttgtggctgttttgatcttctgtccagaccactaagacattctccatattaacaataaggctgttctgctttgttatcatttgcatgttcactagactggcacttttaattttcttcaagaatttttcctttgcattcacaacttagctaacgggcacaagaggcctagcttccagcctctcttggctttcgacatgccttcctaaccaagcttaatcatttctagcttttgatttaaagtgagagacatgcaactcttgttttcccttgaacatttagaggccatagtacggttattaactggcataatttcaatattgttgtgtctcagaatagggaggcccaaggagaggaagagaggtagggggatgactggtcagtggagcgttcagaatacatacattaatggattaagtttgccatcctatatgggcactgtttgtggcaccctgaaactattaaaatagtaacatcaaagattactgattacccatcaccataacagttataaaaatattgaaaaagcttgaaatattgtgagaattatcaaattgtgacacagagacatgaagtaagcacatggtgttggaaatgttgctgatagacttgcttgatgcagggttgctacaaaccttcagtttgtaaaaaaaaaaaaaaaaaaaaagcagtatctgcagagccaataaggcaaaactcagtaaaatgaggtatacctgtacatatacatacatgtgtctatatatccactcacacatatgtgtatgtgtattatatgtgcatattatacatatatgttgatatgtgtatttatcatatctaatacacatatatgtatatacatgtatatcacacacatatattcatattgtaaattgaaaattttctagtgctgtatcccaatctctagcttataaatatattgaatagatgatgcagcaggtatcttttgaatacgcactccaattttagaaatataaatcttttttaaaggttggaataatataagtagtttggtgttcagtgcaaaaggttttaatgtataaatactatgaaaacaaaagttagatcaaatgtatcaaatacaaatgatctgtattgggggacagagggacacattaaatttaagggaatatgaggagaatattgacttcctatgctcgatgagtgaaaaagaaaagtgaagtgggagtgtttgaaaggaaagatgagcttttccatgctagtacatcacaggttttaatactcatagaagtttttagatttgtataggaaatatgatcctccagcctttccaagtttactcttctactggaattacaaatcaaaactaataaatgtttactatgcttcaagtgcaatagttataaagtacctgattagaggtcccacattcagatgttggttatataaaatattcatgctaaatcatataaatgctaaaacatttgtatttgtgatgttctcttggattgctagatggagattaaattatacaaattcagctaagaagaaaaatgtgggataaatggaattttagtttaaaggaagtcaatgaaaggattaattaagtataaaataatcccattttaatttgtcatagaaatgagttttctgagacattgttgtaatcaataacgtgaagatgtaaaattttgcaaaaaaaatcattacgggaaatccaaaagcagaagagtagactctgtatttaactctagcagattatttagaaagaaaatagtctatgccatgaacctttcgactgtctgcgtgaacaaatgtctctagtaatacacactcttaactcaattcccataggctcaaagttgcaacagtatttatttgcccgttcaacggttttttgtttagcacttactatgtgttaggcacttccagggatatgagtgaacaaggtagttatgggtcttactctcatagaggataattctttaggaatggtcaaaactatacatatacacataatgtgattaattgtgatgtgttttgaaggaggaagcaaaggagttggaacagtttaaataagactgtaggttggcagtgggaacaatggtctttgctatcatttttcaaaaattccaatgaatgggaatgacgactgttgcattaagttgcctgtctccctctgacccatagtgattctctattatcagagaggtagggcatgtttttcagcatatgtgataatatcaaacagattcagatggtgaaagtaaaatttcttaatgcttagaaataacataatttgatcaaatcatttggatatgttattaagttgttgtaagatatgaagacgtagctgttactactgccaatagtataaactttggattcagacctagctgtgtttgaatattaactctcccacatcccacgaggttgtgggcaagctattcacatcattgtcactaccgtcactactatcccacccacccttgcttcattttcttatctgtaaagtggcaatctgttggaatcagggttggggaaggcaaatagtagtcattatacgaatggtaactatgctatcatcaataatatagtctacagctatgatgaagctaatcagaaaacattgtctattaccagtaattagctatatcaataactatcacaagaaaagtcccagctgtcagtgaataaatagaaaatagtgctttgtcttagagaaacacatacaaaatgaatggtggtgacagtgctttaagttaacttgtcagtttatatgtgtaatgcatatataatttcaaatgtataatttagacattgtacatgtatatttggcctggtaatttatggtatacataaatgataaatgtataggttgaaaattcagttactttttttccttttcttaaatcatttttaccttgctgaagatatgctcttttctctacttccttagaataatatattttattttctcttaaagtattttgagaccatatcaccatttactacaccaaaatgtttttttgcaaatgcggtattcaagggtgaatttatagtggctggggacctatttggaattcagtaagtaaaactagattttccttattcctcatctgagatcagagctatttctacctctagcaaagacatacagtcattccgggtgctgcattttcagggaacaatgtgttttcttggcaaggggcagtaagaccatcaattaatagttcttcatgtaaagtagctaaactactgttataaaggaagtgaaatttgcatacataaccattaacacatgaggttagttatgtacaattttgaccaaagtgcctgtttgctgctggtatttattataataagaactggaaaaaaatagtctatctcaagagcatgtgctgagcacccgtaaattgcaagagactgtactgggcagtatgagattatagtaatttgggatttcctactaatgaactgagagggaacaggtacaaacacagtatacgaaggaaacagtggcacggagacacttaaacacagcagtgctgggaggctccggggtaggggagggaggaagagagatacgggttaatcaggagctgctctctggggaagattgcccaggccctgactgatgcctgacattgattaattgatactctatcctagtgtttaacaagtgttccatccaaaaagtcttctgtaatatttaacttcacttccttcagcttcaatttctgcacaattcttttgtcgtctcatcaagagagctagtcagcagacagtaacaaaatgcttatattcatatacctgaaggatttttttttgtcatgcttcagccttctccagactgaagaaaagcaaataataaacaaaattaatcgttcttcagaaggcctgtttgactcattaataaataataagctttgatactgtgctttaagtgtttaccctttggaaagaaaataattttgacagtgatgtagaaataattatttgatatttatttcaaaacaaaatttatatccaatactaaacacagaattttgtaaaacaataagtgtataaagtaaaatgaacattaggattattgagattattgtagctaaaactagtgtttattcatataaattatgttaataaattgtattgtcattattgcattttacttttttgaaaagtagttaatgcctgtgtttctatatgagtattatataattcaagaagatattggatgaattttttttaagtttaatgtgtttcacatctctgtttcttttctctgcaccaaaagctacatttttgtgcccttatgtaccaggcagaaattgatctgcaatacatgtggagtctccaagggtatatttaaatttagtaattttattgctaactgtgaagttaatctgcactatatgggttcttttccccaggaaactgaaatagcagttcaagctaaacaaccggatgtggaagagattttgtctaaagggcagcatttgtacaaggaaaaaccagccactcagccagtgaaggtaatgaagcaacctctagcaatatccattacctcataatgggttatgcttcccctgttgtacatttgccattgacgtggactatttataatcagtgaaataacttgtaaggaaatactggccatactgtaatagcagaggcaaagctgtctttttgatcagcatatcctatttatatattgtgatcttaaggctattaacgagtcattgctttaaaggactcatttctgtcctggtgtgctgccatcaatacaaaagtagtcccaccttcaaggtagattaaattctttggggctttattgctttgcttgccagccttgatgcttttcatattgtttggtttaattcaaatcaagctactgcatcatagtgtctgtctccaacagctgtaaagaatcacaatatggtccgtgacctttcttttctttgttgctctttcttataaaagagtaaaatcggcattgaggcttcagtattttattgggtcaagaatttttagtgaaatgtcatgtaattgcttatttctttggcaaaaagctggcctgggataaacctttctacttttttttcttctccatatccatgttgaagtctaggtcacatttattcacaggctattacataaggagggagatggaaagccaggtcagttttcaaaaaatagctaatcaatggcttccatttgcaaatgagagtccagtgctaaatatacgttagcagtaggttacctgattctctgtacctgaccagaattataatggctcccattatgatgaaggttcctgagatcctgtaatcatggctgtttattgatcagtcttggtttctcagttaatgttgcaggcttggatacaatgaacctcgtcctcatgtttaaaactgcttgaaaacagttcaggtcaataacctcattatacagaaccagtttgtccttgcaaacaacattaccatgacttagattctgtctctaaggtcgctgcttagtttcccttgcgcttggcccaagcttcatttctagaagattgtttgttttccttacagcttacaagagacttttccttaggtagagttgaagtttgcacctgagcttaatgtccaaacaccagacactgaaaatcacaggtttctctgtagatatcaacatacttttattcagaaatatattgcaaccactccaaaaatctagaaaagtagtttgtatccagttcaagcccagtataatcatttttcataagctaacaatgtgctcagtatttagttggaagagctaggcaaagtcctgaaagcagcaaatttcagagtttccgttgatgttctgaagaaagccagccctcagagcagttaatatggtgactttcattgtagcaagccatgcagtgcacaaatggacaattgcatacgtttctatctactctttgttgatcctcaaagactttatgccttatggtgtatgactatgaattaaggtttgtcactaattgttagagatcacaaaggtacatgtaatttggcttttacttttgtgcctttgtaaaagagagagagagagatcttaattaaaagccactgagaaaatttttgctttcattatgtataaaacaatccaaatgcttgatgctaacttatcgcacctccacccacacactcaactactgggccacttggagatcagaactgggatctgccatgcctgagcatatctgcttcctgctgatgcattagtgatgtaaaaggagaattacttttctgaaataaaaagaaagaaccaggagctgttgctttccttctctttcacaacccttaaaaccatttttgtagcagacagcactgtttttttccttcctttttttttttctccttccctgtttccctattttctctcaatttgacacattgggagaagctgaacttaagggaaaatttattcctgtcttcccatttctcccttggatttggagaaaaatcaacatatcaagttggctgggcatggtggctcatgcctataatcccagcactttgcgaggccgaggcaggcggatcacctgaggtcaggagttcgagacctgcctggccaacatggtgaaaccctgtctctactaaaaatatgaaaatgagccagctgtggtggcaggcgcctgtaatcccagctacttgggaggctgaggcaggagaatcacttgaacccgagaggcagaagttgcagtgagccgagatcgcgctgttgcactccagcctgggcgacacgagcgaaactccgtctcaaaatatatatatatcaagttgataggggcaaaaatgcaagaatgatttgagaattatggggtttaaaaaaatagttgactcacgcacaacttttgctgtggaccatgaccttggaaacatctgaagattagctggggtttgcggtagcctgaaacacctagaggctcaaaaaatgacctcacagttttgaacatgacacccagcaatacaaggcagaaagctgtgagggctgtttaaatctctgcatggatcaaaaatttatttttaaaggttagagatgatttttctgaaggacactccattgctctgatagaacgtgaacaaagcctttttaaactttgagtccatatatcaaaatttaaaatttgtcctatttataatgcctcttcttcactctgggtcttgttacctcttaatagaagaggaaatgagtctgagtagcctgcagcacattttcatgagagaattgtgtttctgtttttgttttttgggggaggtgcatttggaaactgtaataattatgaagaaaatgatattctttaaaaagaaaatgaaaatctctcacgatgtatatgcaagatctagtatttaaatgcataattagtgtgtccaccgcttacaaacattctaattaaagacacatcagggagcaattctgtttcttaggaaattgacttgtctattggcacctccgcattctgcatcagacagcctgtctgtccagctcctacgctcacctcccaagctgagttctgattggaagctgggttcatccctgctcagtttctttcctctttcttctttccttcacttcgtcaacttctttaagatttcttttattttcaaagatggtatatttctggtttcttttttaaaatctctgactaaccaacttctttattttctttgaggacttcctgtaaaaggtcaaatacatattatgaaatgataatactaatgacgtataggtagtactaatctctgctgcaaaataactggaaaaatcttaggatcgtatgatcaaatacctctccatctttgtttagcacttcaactctctttctctctctctgtctctctctctctctctctctctttccctccctccctctccactctctccctctctccctctctccctctctccctctctccctctctccctctctctctctctctctcccccttcctcccccatctacacacatacttttatttatttgtatgttatttcttcatcttaacttcagaaattactgaagactgactatatgagttatataaattgtttaaaattttgctaaagttatagttttggtataatatattacattaatgccatagatgaaatagtctttaatgtgttccatttttccacacagtaataactaggtcctcaatagcaccccatttagcagtttaaaagcagcaaaaacaactgctatcagtaacaacaatataaactacaaaagaagccatttgttatttgatttttattataaaattgtatttttaactgtcttgagcttaagcatttaggtgccattttcttgtattcatactcatttttaacttaagttggaaaactacactttcagttaacttttaaaaatatgtttatgtactttcaatgcttacatcacctgccatgtattagaactgagagcattaatggaattttaaatgtcttggttactttctaaagtgataaaatgaagccagctggtttgctttgctaactttttatattatcaaaaaatgttacttacacaaacctagtaatatgttttacttactgctcttgaattatttttcaatgtaacagaaaaaggtgtgaggaactttctgtatttggccaaagcgttccatcccaacctttaacacaaaataattgctgtagacaaatggtcaagagggcaattataatcttccaggcatcatttcctcagatatgaactgcaaaatgacagcatcattagtcattttcaattacagtcagtcacaaccagggatgattcattttcccagctgttttgttgttaattaactagatgaagctgtttttttttctcccaatgagtttgttctactgccaacatcaacatcttaacatttttaaaaacttccttagggtttattttttgcctaacaatctttaatatattactcacaaaagatgtgcatctcaagatttatccacggtatagcaggtcaaatggtatttcattggtcgaaatgttgccgaaataaatataattacacttaaaacaatacttggatttcataaatcatctgccatgcgtacaatctcatttacctggtgtaacttcacttgtagcaacagaaatcaatagagagataacagacaaaaattgtcccctgaaatgaacaagtctattttgactgactcatttattgagcacaatttccatgccaataacaccagaataagttgggagaggacttctagaaagaagataacaatattagaggcatttaataatttataagtaaatgcatagcaacattttatttttttaaattacaagtttgcgactgggcgcggtggctcgcgcctgtaataccagcactttgggaggccaaggtgggcggatcacaaagtcaggagatcgagaccatcctggctaacatggtgaaaccccatctctactaaaaatacaaaaacaaaattagccgggcttggtggcaggcatctgtagtcccagctactcgggaggctgaggcaggagaatggcatgaacccgggaggcagagcttgcagtgagctgagatcacgccactgcactccagcctgggtgacagagtgagactccatctcataaataaataaataaatacaagtttgctttacaactgaaaaaaaagtcttggagtataagaggttgaataaatgctaatcccaatgcataaacttgaggagagcttcactttcccaatgagaagagaaaaaatttataatagatttttgggcaacttgtaaacataaacatttagaaatatggatgagattgtcaaatgtctaattatattcaatttcttaattgagtagcatttccatatttgcagtcttacattttataaaataacacactcatttagaaatacctggcacatttatattttatgaaacaatttcattcaaacccttcgtatgtatattctagaattgtagagctcatcaccttgctaagttatttgtaatatggcattgtttgaatccctacataatactctgaaagccctctggccaagattacaagcaacatatctgtaatcaaaaaattaagaatatttaccttattgcagcaagagcgtaaaacacttcagagtgtgggcatctcagtaagagggcattggaaaaagcttcttacagagttcagctggctgcatgattctaaggaggaattcagaaagtagaagccatttctggattagatgctttcaagaaacagagtcaatgtagtgattaggtatcttagtgtttatctagaagatgagattaaagtagggctagacacgtcgttggtaaaggagcagcaatgcctcatattagtcatttctgtgatagcagaaaggccttgtctctgtcttgtttcaaacacggccatggggtggccttgtgtctgcctagtttatttctatgagtgttttttaacatccagctgggaccatcatggcctagctagctgccagctgccagctatcagcagagctatttttcacgttctcaatgctgtcgctgaaatttttatcccaaacttcaatacccattcacaaaatattaggaaaactgtttttttcatttttcttagatatgattttggttgtttgtttgtttttgagacggagtttcgctcttgttgcccaggctggagtgcggtggcgcgatctcggctcaccgcaacctacacctcccaggttcaagcgattctcctgcctcagccttccaagtagctgggattacaggcgcccaccaccatgcccagctaattttgtatttttagtagagatggggtttctccacgttggtcaagctggtctcgaactcccgacctcaggtgatcaggctgcctcggcctcccaaagtcctgggattacaggcgtgagccactgcacccagccagatgtgatcttttaaaaattcccaatagactaacatattctttctgctttttaagttgtttggctttttaacaaattctttgaaagactcgtttacaatgatctctgccacgagtgattgtgaagctatacattaggaatgattgctaaagatttatcaactttctttgcctccctttttaattaagcaaattctgtcagaatacttatgtaagcatcacatctcttgaggttatttcaggctaatatacaacattgtggttccgaataaaataattgagacataagagatagtataaagtcttgaatatgagccaactttcttttctgagagaatatttgagtgaaaagtctcatgtactcagtagctcatgctgaaattagggaagcattttagagatttgaatttcacctcttgtcctcagttgtattagttacacttaaagagagagacaaagagacatagatgtttcagttacaatattcgaatgtatgcctgtatatatacagccgtaggtagagtcctttatttattcagtagatattaattgcatgccaaccattgacacaagatatatttttaaattttgaaaatctcaaactcaaatagagtttaaaactatattctagtttacttttttaaacaaatgattttttatgattgtattaaacaaatacattatttttccttacttattctacatcaaataatatctatttctagaaggcttttttccttgtcttaatgatagaaaacataaaaatcatttaatattttttaaatatccaaaaaatatgaggcaagaaagcagccacaattgtagctaccttaggaaacttaattaaaaaatttttttttatttttaattttatatgtgtataattgtacatatttatttgtgcggtacaagttatattttgcttattttttataatttcagtagttttgggggtataggtggtttttggttacatggatgagttctatagtggcgaattctgaaattttttatgtatccatttcctgagtactatatactgtacccaataaatagtcttttatcccttacctcactcccaagctccccacttagagtccccaaagtccattgtatcactccgtatgtctttgtatcctcatagcttagctcccacttacgagtgagaacatatggtatttagttttccgttcctgagttactttacttggaatagtggctgccagctccattcaagttgctgcaaaagagattcttttttatggctgagtaatattccatggtatatagataccacattttctttatccattcattggtcgatggacacttgggttggttccatatcttgcaattgcaaattgtgctgctatttttgtgctgctgctttcttttttgttatttccttttctggttttggtattagggtgatactgacttcatagaatgatttagggaggattccctctttatcttttgaaatagtttcattataattggtaccaattcttctttgaatgtctggtagaattcagctgtgaatccatctggtcctggacttttttttggcaatttttaaattactgatattcaaccttgctgctcgttactggtatgttcagggtttctttcttttttttttttttttttgagatggagttttgctctttcacctaggctttagtgctgtggcatgatcttggctcactgcaacctccaccttccagtttcaagtaattctcctgcctcagcctcccaagtagctgagattacaggtgcccaccaccacgcccagctaatttttgtatttttagtagagtcggagtttcactgtgttggccaggcaggtctcgaactcctgacctagtgatccacctgcctcagcctcccaaagtgctaaaatcacagacgtgagccaccgcgcccagccaaagcgttcagggtttctatttcttcttgatttaaactaggagggttgtgtgtttccaggaatgtatccatttcctctagattttctagtttgtgtgcataaaggtgttcatagtagtagtgaatgatcttttgtatttttgtgatgtaggttgtagtgtttccagtttcatttctacttgagcttatttgaatcttctctcttctttccttggttaatcttgctaatggtctatcaattttgtttatcttttcaaagaactatttgtttcatttatattttgtatttttttgtttcaacttcatttagttctgctttgatctttgttatttcttttcttctgctggatttgagtttagtttgttcttgtttctctagttccttgaaatgtgacattaggttgtcaatttgtgctctttcagaatttttgatgtagtatttaacactatgaactttcctcttagcactgtttttgctgtatctcagaggttttgataaattgtgtcactattaatcatttcaaaaaatattttaatttccatctcaatttcattgttaaccccaaaatcattcaagagcagatttcttaatttccatgtgtttgtatagttttgagggttccttttggagttgatttttagttttattccactgtggtctgagaagatacttgatatgattttgattttcctaaatttattaagactttgtggtctcttgtatgacctgtcttggagaatggtccatctgctgataagaatgtatattctataattgttaggaagaatgttctgtaaatatctgttaagtccatttgttctagggtgtaatttaagtccattgtttctttgttaagtttttgtttcagtgacctgtctagtgctgtaaatggagtattgaagtcccccactattattgcattgctgtctatctcatttcttaggtctagtactattgttttataaagctaggagcaccagtgttaggtgcatataaattgagtactgtagtaaatatcttcttgttggactaatccttttatcattatacaatgtctttctttatcttttatttacggttattgctttaaagcccattttgtctgatataagaatagctactcctgcttgcttttggttcccatttgcatggagtatctttttccgtccttttaccacaagtgatattttgatacaagcatataatatataatgatcaaatcagagtgattgcagtatctatcaccttaaatatttatccattttaaattttaaaaggaaagctatattcagaaatcactttttcttgtaactaattcctgttcttcataaagcagaaatttcatagtttgatatagttgtcttaacatttaatgaatattttcaagcaaagtatatacaatggagaataatgctcagctgcaaaagtcacctataataaatctgatttttccatttacaaacaaaagaattcccaaagtttatccattttggtagaacacgaattcactctgttgagtttggagctcttgtgcggaaaaccttggacctgcaatttagttagcatattcaaagttttaaaattatggagatgtagtcaagaataggacttgataactattatcccactgatacgctatttaaataagttgggatttaagtacttatttgatttccttaaatttgcttatagatgattaacatgtattgcaaattgttaccttttacagatttctattgagcactgcttaaattttattatatgatgaacacctgactagttgctacagccaaacattttttgttatgcaaatgaattttacagcttaattggaatgatgagagaattgaaaatatgggcaaatgccagagaagtgaaaagcaaaatgaagcaaaacaaaaaagaacttgtataatatataaataatccatttcaactctacagtacaccaaactcttgaaaaagtagcaagattgtttttgtgaacagccaaatcaaaaactgtagtcatttcataagtatttgctaataattataaaagattggaaattatacagttctgagcttattgaacctttgacccattgcagtgtcctcagacatttgtgatacattggtagtgccatttaattttaaaaatccacctctacattagagattatagtaacccctcatttacctatctggaaataagagtgggaaagataatattagagtaaatggacagactatttagagtttatgtattaataaaagagaaattgcatgtacaaacatgttattttctaggtaactaaaacctagtcctttaataaagcactgaaaaaaattttatcgtaactattttaatgagaacttttcttgaatatcttctgttttgcttcattgagcagcgcataatatctaaccaacaaatttatagtgctttgtagttcacagcatttttaccatataaaatatctcgtttagtttctccaacaaagctatgagttaggtggtattattatatccatgtttcaaggatgataaatcttagtgacccatctcattttccaaggatcacacaaccagtagtagtgaattaggaacgaaacctaagacttctgattctaaatcacaatgtaaattaacttttcttaattttcaggggtgtcgttatcacatcaatttttgctctgtttagtgatacagtgttatatgaggaacatgaaattcaaagcaccctttcttcagttgagacccagttgaagtggttaatttgcttttagaagctagactgtaagataaatacatacctttaagtattaaagctaactcaaatcactgagatacttacaccatgagaagagagtggaacctaagtcaactggtagaaacatagaaacagcaaactttgatctctctttatcctcattctgaggggcaatatgcttactgagtggaaagatgggcatacccccagcagtatttaaatcaatccctaatctatcactatctctccttttctctctatctcagcacatataggtgatttcctataaattaaatggtgtaggatgagatttcatcccatgttgaaaggtcatttcattgataaatgactaagattaccacatttctcagttttaagtttttcatgttcattgtctcctattgctactttctgttatcagaatgattacttctcattgcttttagtattctgtctttgtagggttacagaaacttcacagggaaaccagaagatcaaatatattactcactagtctcttagaatatttaatttttagtgtttaggttctgatgtcaggacaggaaaatatcttccgtgagtgatgacttccaagggtggttttcctgactaatcagaggcattattttttgtttgcttttgggttcaagactgatttttaataaataaaaaagttacatttattgatatgctagtaaatatttacatcatgcattctggataaaaacattgaaagccttgatttgacttgatgtcagacacaatagacatagtctcaagagcactgatgatagttaaattaggaagtgatgaattcttactatatattatcttttgttcttagcacagtttattttatatttataaaatttaatttatattaatggttatgtttaataaccgattagcaaaattactgaaatgtgacaataatatctctattcctgtttctttcctgctttatccttttaaaatatattatttataagtatattttaaatttataaaagctacattgtgctataaatcttgtttcttagcttttctaacattcataattgtgttttaaagatccacccatggccgggcgcagtggctcatgcctgcaatcccagcacattgggaggccaagatgggcagatcatctgaggtcaggagttcaaggcagcctggccaacatggtgaaatacaaaatacaaaaattacccgggtgtggtggtgcgagcctgtaatcccagctaccgggaggctgaggcaggagaatcacttgaacccaggaggcaaaggttgcagtgagccaagatctcaccactgcattccagccagggcaacaacagtgaaactccatctaaaaaaaaaaaagaaaaaaatccatccacattgctctacatatacccttatccatttctttcacatacatacccatgttggcctcaattccccacaatgcagcaacaaactttcttgtacttccttatgaccttaagaatgtgagagaaacttctccggtatacactggtgagggaatatgatcagcagggttttttgtttgtttttctgtgttttgctttttaacttatgcccacctttctgttggcagtcagcagccacatctgaagttatagctctctgatttagacaaggcttattcttccctttgttacaacctagtccctatagggacctgaatttgtgaccctagtctatgagattactttttaaatacagtttggttcaggatttataaaagcctaataaggctgggtgtggtggctcacacctgtaattccagcgctttgggaggctgggatgggcagatcactggagtccaggagtttgagaccagcctgggcaacatggcaaaaccccgtctctacataaaaatgtatgtactcagtagtactactcagtagtagtactgagtagctactcaggaggctgaggtgggaggattgcctaggaagtcgaggctgcagtgagccgagatcttgccactgctctcccgcctgggtgacagagtgagaccctgtctcaaaagaaaaaataagcctaataaaatgattgcacgcctggaaaacctacataggctccttcaagtcccatatatatataaagtcatccatggtatgtagttcacattgaagtcaagttgggggaaaagaaacttatttatctctttctcttttcctttattcaagtagcaattttcatttaattttattcaattcagaaatatttactgaactcctcttattaggaagcactagactggatataaagaaaacatcgtacaaggcatagaggactcagtcctgccttgcgaagggcacatagtctgactggaaagacacatgctgacagggtagactgtgttaggaataatgctcaaaatcctgaggacattgaacactcgaacaaaggattcttagcaaagcaattttacttctgcacagaggggtgcctccttggccagttgccatgagagcacacctgaacaaaggggcatgagagcctttattcctgacgcaagtcctgcccctgtaccctttccccccattggctggggttgggtcgtacaatctaaactaatcccagttggctaaacatttgatttttttagatagggtgggcacgtaaaatcaagtggagaggaaggggaaggggcgtctgtaatgagctagaaagttagtcctctttccaaataaggaaatgaatgtgagctggtactgaggtgtgcctgggcatctaacaaaggtaaaaaggaaaaaggagaaaaatcagggggtactatgaattaaagaataaaagattgatcagattatttgaagagaaacctcatcatatcccacaactggaagaaacaatttgatggcaagtttctcttcgtcgtttaccagctcaaaatctcaactatcaaaggcaagaaaaatacacacacacacacacacacacacacacacacacacacacacacacacccctctgcctttttctgtatggccaaagccttcagtccagctgaccacttcccactccagttaccatgttagcctcccaacttgtatctctgcacccttctgataaagcctccacaatgcaaaacacgaatcgtatcatatggctcttcttctctaaacacttccatctactctgtggttttagaagagaatgtaatagtcccacattacaaggtcttaataaattgcattcttgcagctctgtatcattacttgtaaacactgtagtctagatagccaggacacactgcatttcttttttaaggctcgatacctcttgccattttgcacgtagttttccttctgtctgaaatgccctttttccacctggcgcttgaatggccccttctgaaaacttcctagtcgtctttcaaaataaattcaaatgttagcttttgtgggtaacctattgacctctccaggctgagttaagctgttcccccgaggtgtcttgttgaaatcattattttttcctaaaatctctgttctaatttacttacatgtctgtgaatgcttagaggttacgaacttcagttttgtaagcttagtaactggcacaaagtctggcacagagtagcacctgaacaattatttttctggaataaataaagtaatggtttcattgaaatgattcgcattaaattaatgattagcattaaactacaacgtgtatatgaaacattccagttaggttgggttcattccattcctatttaaagagtttgtagtttctggctcttttccaactctgattcttcagactagaaatgcaatttctgctaatgtatttattttaaccaaacccgacatcaatcaagttatttgtattcctcataaggtaagcataggaatttacagtgatacaaaaacgcagctattatctcttataggcactggtaaagcttttgtgactagtgctactatactggtaaggtattgctgcttgtaatgaactaaatatttcagtggcttaacacaataggagttcttttcttgctcacatgacaacccagcgtatgttttcctagtcaagcagctttcttacatatgttattgcagaaacctaggtcctgttcatcttcttcctctgcctgccattcccttggtagcttttctctgctcgggtttcgcaagaggatgaaatcctattgaaaatgatctgagggtctattatgttctcaagaatggtacatatctagtctatgataaatgctcaggtaactgattaggtgtaatagatatcttaggattttgtcatgaacaatcagcatcaacaccacctggaaaattgttaaaaatgcaaattattgggctccacccagtatctactaaatccagaactccggggctaccatgcagcaattagcaaggtctccaggtgattctgttgatcctaaagtatgagaacaactgccctagggcgttaggacttaattctctcctcagtaagttgtaaagatttgccgtaggacctaagagtcttctgcttccagcaatagaaaggaaaaaaaatgtggaaacctcactaaatttttcaaagcctcagccccaaactgacaaacaacacttctgctcacattctgctggctataaattatcgtatagctagctgcccagtgaagtggaaccagctcaggacggcctactgttatattgccaggcattttttgagccacttgatgttatcttcttggtaatttaaatttaaccgtggtaggaatatttacaccacagaaattggcaaacactaaaaacaaggtgtttttaaacaccctgagatcagagatccagttgatatacatctaccagcacaccactggccatatacaggcttgccttatgccacggggagctctgcagctgaagtagcccttcaaacttgtcctgctttgagccaaattaggcctctatactttcaccttcatcagtcactgaatgagggctgcctggggaaaggcatgaacttggacaaggcagctctctgcagctcaggcagtccctgaagggactgacagttgaagaatgtctactgacatcatttccatcatctagaacaagagtctttctttgaagggggctctgagtagcatattcccgtgtccactgcagcccctccctttaagagactctgatataattgactgggggtgagccagtacattaggattttcctaaagttatctggataattttagtatgcaaccacaatagatactcttcaagaattaagctagttgctgagagggaactgttttttgttggtttgttttcactaatgtttgcactctacttcctttaaataaaattatgcctggagaaagggtttttgtatggagcaattgataaatatttgtagggtggttggctaaaataattataattcctttaaaagaaattctacccactaaagttaatttagaagtaaaatataatagaaatccaataatatattcaccaaatggattaagatgttcatgaattatcttcaaagtgttaatcgaataagtaatgtgtatgcttttctgttaaagaggaagttagaagatctgagctctgagtggaaggcggtaaaccgtttacttcaagagctgagggcaaagcagcctgacctagctcctggactgaccactattggagcctgtaagtatactggatcccattctctttggctctagctatttgttcaaaagtgcaactatgaagtgatgactgggtgagagagaaaatttgtttcaattctaaagatagagataaacctttgtgttattgactgtgcaaaaagtcttagagtacattccttggaaattgactctgattcaaagtgttgcatgacaacgggatatggggagtgttctctggagatacacccacaaggaagagaagagcacaagggagattgtgggagagtctgaaatgtgatttgtctgcagcagaggcctaagccagtctcgcaggagccctacatctgggctggctgtgcagagctgtcctgaattgcaggcagtgggcctggcccttgtattcctgatccagccagccattggccaggggctggctgctgcctgagagtggaaggacaacttggacaagttttctgaggccgaaggcaattcttagtaaggaacaccattaacaaccaatattcctagcatccagggatgtgtgcattgttcctgaagagggacaagtatgtctacaaaaatcacagaaaccacagaaacacacacagtcctactagcacctctccctgtcccatttgcaaacaatttaagagctctcccatttttagttcaagaaaaagaaaaatggattgggaggaccacaagctgacttgggggaggaatatttcctcatttagctgtagttttaacttttgttttcactgcatattttcagtctattttattttctttcctcttcagttgttgatagaaggtattcataaattctcatggcaatgttaatgctggctttgactctcaggggaaagaggccagaaaacttctttgctgtaccattccataattaggcagaactaaaaacatctttgggtgttgttttttgtttttgtttttttttttgccttgtctgcttttcaaagatcaaatgattgaagcattaaagcatggtgactggttcttcaggtaaagttgatttttattttatgtcaagtagaaaaatactgaactggaagaatcacagctggggtagcacaatcataattcattagaaggcataaatagtgcttggattaaaagaagccctacaatctggggacagtgcatctcatgtgccctctgggattactcggcagtcatcagagttagatttaacgactttggagacttaagcattatggttttttttttttgtcaatctgggacactgaaattgctgtatcagggttatactcaactgtgtcaggtttatttgtttttatgagctgtaatttttggttccctcagcgcatatgcatagtttgttcctatgttatcatttattggtgtctgttttctggctgtctctggtaggttcagcctcagactctgtaactccatgaagagattatgttccaatgatgttttataagtttgttaaactctgaactcatgagtttatgtcccatataagccacgttacacatggtaggaaggctccaaaaccagggcgccgaaatccatttaacgtgtaacttacctaaatgtaacaatgtttataagaaaaatacattggaagttccagttttgacttccagcaacatatataattcatccactttatttattaacttccatgtgttgagcatcatactggtgctgcgagtacagcatagaataaaagtctctcctttcataaaacatatattgtaattgaaagagaaagacaataaactaatgaagaaaatatatactgtctcaataattataagtgctgtagagtgtagtctacagattgatgtcaatgggtatttgttagacacacagaatctgaggcccctatcctagacccactgaatcacaatctgcattttaatagaatccccaggtgaatcctgtgcacactgacatttgagaaacaccattacagagaacaactaagcagggagatgggatgagggtattattgtctatagtgtggtcagggaagcttgtctgttaagagaacatcagaaaactgatgtaagtgaggaagtgagcctggtgtatttctgggaaaattattccaggcagggagagaaaagactgagcaacgatactgaagtaggaacaagatgacggaatattaaggagatcagtgagactagaggagtgggtcaggggaagtgtgatggaagccatgagagatactcatctttcatagcactgccctacttccttctccccaacatgagggtctcatcaccccccaccactcttgtcttctcctatgtcctccacattgctgccagtatggagagtctgggaatgccctcagctcaaagctgtttggtgatagctggcagagttgtggtagtagctaaaaaagaattaagggaaagaggaattttctcaaaagcaggtgcttttcatcctctttagcaaaccgaaacagatctgagcattaagtcaagatgttaaatacacaaatgttgaatgaaaaaaaaaacaaaaggtagtcatttaaattcagagctgcttttattaaaataagattttcttttttctttactgtggtagttcaaatatcagaataaagaattgtttctattcccgacttcctgacttgcaggaagttaatcagaaataaatgcaatataaaaaaagaaaatctaatttgtattatgcttcttgtatatgtttattatttcatgtactgtattacaatgtaatagaatttataattcattatagcagattgtttccattgcattcctactattaaatatgtagaagctacacatatacttgtagctttaacatatatgtctttatcctcaaaataactgcaaagaacatatagataatttttaaagattaaggagcctgaggtttagaggggagatagctagattaaggccacacagctagaaagcaagcaagcaagggtttcagtccacatgtcaagctccacagcctgtgttttgttttgtggctgtgctttacactatctctctgtccaagaacctaatggaaaattacagatacagatgcagctggccagcagttaatataatttaactcaatcttaaatttatctggagtaaaagtgatacaagtttccgtgttttttcttttctttctttcttttttctttgtgtgtgtgtgtgtgtgtgtgtgtgtgacagaatcttgctctgttgcccaggctggagtgcagtggtgcgatctcggtttactacaacctctgcctttcaggttcaagcgattctcctgcctcagcctcccaagtagctgggatacaggtgcgcaccaccatgcccagctaatttttgtagttttagtaaagacggggttgctccatgttgatcaggctggtcttaaactcctgacctcaagtgatccgcctgcctcagcctctcaaagtgctgggattacaggcatgagccaccttgactggcctgtttctgtgttttttctacttaagaagtagaaaaaattggttcactctatttgaatttcttagaaccatagaaatccaaacttggaataattattgcaattattatctagttgagtattcttcttttatagatgtagaagctgaggcctaaagttgcttgttttgttttatgaacactaaaccaaactaccttgtggctgcttacttaaattataaattataatggggtggccttgcctgagctgtataaattgttttaattatcaggacaaatcaacatactggaaaaaaaaagcaaaacttgcaattgttgttgcttagacacctgtccatatcagtttctattgttgcatagaagcaccccaaaacttaacagttcaaaacgagtgatttattgctcataattctgtgtgtctgaagtttgctctgtgattagctggatagttattctgatggtcttgcttggtgttacttatgtggatgcagttatctagcaagtgaacaggagctagatggtctaaaatgcactctctcagatatctgacagctggctgttggttgcagaaccttgattcttcataaggccactcatcatcctgtaggctagattaggcttcattacatggtattctcagggcagttttccaagagagggcgggtggaagctacaagaccttctgatgcctaggctttgaaacgtgtaggttacttctgctaagttatattggtcaaagcacctcaaaagatcagcccagattcaagagatgaggaaattacttcatctcgtgaaaggaggagatgccacatcgcatatcaaaggggtatgcatattggggatagaaggttttattgtcaccgtatttatacacaaatcactacattggggaaaaggagggaaactggagatcaaaagtgttggtcttaatccaacttaattctcaaaaattaccatgcgttagaaccacccagttcttcgcaaagtatagattactgggcttcaaccccagagtttctgatttactagctctggggtgagacctgcatctctctctctctctttttttttgagactgagtcttgctctgtcacccaggctggagtgcagtggtgcaatctcggctcacagcaacctctgcctcctgggttgaagcggttctcctgcctcagcctcctgagtagctaggattataggcacccgccaccacgcctggctaatttttgtatttttagtagagacagggtttcaccatgttggtcaggctggtctcgaactcctgacctcaggtgatccacctgcctcagcctcccatagtgctgggattacaggcgtgagccactgtgcccagccaagacttgcatctctgaaaagttcctaggttatgctgatgctggcctatgctttgagaactactaccacagacatacagtgagtggggaagaataaattcatcccttctgctgtgtgcagcaaggagtgggattccaatgagatccagtgctgtgaatgctaaagggaaatccatcttattttagcacctctactccccatctccccaccccgaggatgttatagcttagaagttcaaggagatggacaacacactaaaccaggcagtatttgccctgcagagctgttcagtgttcctggatgagacctctgagaagaaaagccataagttcctctagagactttcacaatcatttaggtagacaggactttgcatgggtctgaaggcttgcatggcagatggaggcaaagagccagcaaatctggttgtaaatgtcaatgtgaatcctttcttatccacaagctgctgggcctgagaacattaatgttctacaatacccgatttagcatttttgaaagaaattgcatatagacatgcttaatgtgaagactccaaatcaggatatttgattcaaatgtctcttggtaataactatggaatgaataacccattgtatatggacatatagaagagccagttaacagagttttctttttttttttttttttttttttttttttttttgagacggagtctcactctgtcgcccaggctggagtgcagtggcgcgatctcggctcactgcaagctccgcctcccgggttcacgccattctcctgcctcagcctcccccgtagctgggactacaggcgcccgccaccacgcccggctaatttttttgtgttttttagtagagacggggtttcactgtgttagccaggatggtctcgatctcctgacctcgtgatccgcccgcctcggccttccaaagtgctgggattacaggcgtgagccaccgcgcccggcccagagttttctagttgattaaacactggtaaaatcatctcttcctgtaattaagtttggagagagcaagtctcaagtgtaattaggaaagcacagtattggaggtcaagaagcctaaattctgatatctcagttgtgctaccaactatataagggatcaacagactgtttctgcaaaggaccgatactagatattttctgctttatgggtcatgtggtcaactctgtcattgtatactaaaagccacagacaatacctaaataaagggacatggctgtgctccagtgacactttatttacagaaacgaggcaggtaagatagatttgacccttagtgggctacccatttccccttagcactcagccttcctataaaccatgaagcgtctaactacaagtacctgtgagtcttcctgagtcctttctctgcctgtaggagtagctctcccacttgcagagcaggctggaagctggggaggagattatctctggaatagcacttaaccaatggacaaaagctgggggataaaggtgttggtcttcatagttttcatactgctatgaagaaatacccgagactggataatttatacaggaaaaagaagtttaatggactcacagttccacatggctggagaggcctcacaatcatggcagaaggcgaaggaagagcagaggcacttcttacatgacagcaggcaagagagcatgtgcagggaaactgctctttataaaaccatcagatctcatgagacttattcactatcaggagaacagcacaggaaaaccccacccccatgattcagttacctcccacatggtccctcccacaacacgtggggattattggagttacaattcaagatgagatttgggtgagaacacagccaaaccatatcaataaatatcccaccttcttctccccttgggtaggacacctccaatgcatgttccacactaaaaatctccagtgaattgggcagttgaccacaatgataagcatacttattagcatgcctcgtataggcttccttccgatgtgtaggctttcttcccattttggcagaatctggacccaaccccacatctcctgagtttgatttcagtcctcttcagtattctcatatatctcaactttgttccctgctgagatacaactgacagatatatatgtatcttcagctctgcagctctatcttctcttctaccatggctttctgggatcagctcccaattgaattatttgtatttaaatccttgtctcagggtctacttctgagcaaacctaaattaatacaagtcttagaattagtgccacagttataccttttgagtaagttatgttgcaattcccattttatagatgagataaccaagggtcagaaaggttaaataatttgtccaaggttacagagctagtcagtgacagagtgggtattcaaaaataagtctctatgattccagagcttatgctattaatcagtgcaccatgtatcaagcagtgatttagttatcttcatttgaattttttgaagtctctatttaaattgaatatcaaatcctcacatataaggttatttatacctttttatttgttttatttatttatttatttttgcttaacttttttttattatactttaagttttagggtacatgtgcacaatgtgcaggtctgttacatatatatacatgtgccatgttggtgtgctgcacccattaactcgtcattgaacattaggtatatctcctaatgctatccctcccccctccccccaccccacagcaggccccagtgtgtgatgttccccttcctgtgaccatgtgttctcattgttcaattcccacctgtgagtgagaatatgcggtgtttggttttttgtccttgcgatagtttgctgagaatgatggtttacagcttcatccatatccctacaaaggacatgaactcatcattttttatggctgcatagtattccatggtgatttatacattttaatttgaacttcactcacctctacaaagttaaataaagcattccatttccatttcaataatactttaaatatctaggcagttaaagcatgaggttacttggcacttaaatgtactcttgtcatactacttttgttggcttaaattgcaaaaaaaaaaaatggttaatttattgtgacaataccctacatttatctgcagtgatcattttttttgtgaaaatggccttcgtttatctgcagcaaaggaaaaagaggatggcaattagttcttgcattcttattcctctcttgggtcctgatccttctcattaatagaaacatggcaggggaggggtatataacccacaccctttcctgttgtggttatgtttccactgttgattctgcttcaggtgaacctttaggattaggcaaataaatttccgtgaggccaaatctttttcttcctcattaacagatgatttctctgctaaaaacacttacgacatggctatactattgccggttttatagttacaggctctaaaccttgaaaacttcctcaaagtctaatacgtcaggagcaagcttttgtacaaaaaatgtgaagacccttaatcagttccaataacaaaataaatccattttaaaccctatcccaagatactgcaaggccttggagcagctggagagactccttaactcttgacattaattaattaatttaaaaattcatatttgtatgtatcagtgaggtaagagtgcttgaaatataatgagatgtgtcacactgtagaaaggggagtgacaacagaaagccctggctggtgaggccccagcacttctcacactcatcagaaggaagtctttccatgaaggcagtagggggtccctggtcccaggccaggtccttcaacaatgctcactggttaacaggaaaggcactacagtggcatcattgttaacatccaagacagtgatagaatgtgaaacttctactgtttagtatttagtattcagcatttagatgttaattatccattttgtgatgaagttccctttcttctccctctcttaaccttttggtagttttattgcatggttaccatttccagttagggttgtgctttggggtctgaactgatgaaggaagagaaactctagttcatcatttctaggaaaaagagaaggctaacatcaattctgatgattagagattttttgattacctatgtcctgcattttaacagaaataaaatgttaattacagtaaacttactttaaccttcttatgctatttaacactcttcaagaaaggacttttgcttgaaatcactacagagtataccataatcttgactgtcatactctgaccaagaaaccagaactatttaggcatatttatgagagtaagtaccctaccgctcaaaatggaaggcttcaacatgtattcctaatatttcctaaaacttcactgaatagttttaaaattgaatataactttaccttcagagagaaacaagatttcgaaaggaaattgtagcagttttgtacttcaattgtcgattttaagattgtggtctgaaaagtatttgaacagtcattctttcttttccactatctcaggaaaggctctcattctattagaagcaatcttagaagcgtaactgccaactctcttcttaaaaagtgaagagcagatggagttctaccaatctgctatacttgacagtttttcaactacctaacctaagttccagttactgtctaaattatttttattcgaataggaaaaatacatttatgcttactgtacatttcgacagtgttcattctttgaggtctgttatttaatctccttcccacttttcttttctatcttaaatcagatgagtccccatggtctggcaacaaaacagctgtttctcaaatttttaacgtctctgtggccctcctcctacccttccaagtgttttccatactatttttctgttgtgggcttcagaattggatgctgttccataattactggtcttcccatgactctgtcacatcataaagtctatatatacccttttcctacgtttacatgccaaataccaggtgtgtctagctttaattcaatgactagcatatggtaggtattgcactaatattttttggtcaagtgaacatatattttacagatagatcaaatacatcaaccttcccatgtaataataataataccaagaagattaaatgatcgcgtgcttgaccagctgtttagtggcagaatctggacccaaccccacatctcctgagtttaatttcagtgctcttcagcattcttatatatctcaactttgttccctgctgagacacagctgacagatatatatatatatcttcacaatctcagtagtaagccctatttttttaagattacagtgctgatcaaagagggatattctatggcattgatgcaaatcttccaggccagatataacccctatctccttaaaccctcattcttgactgtgtcttgaaatcaaatttgagaacctctgctttacatgctaccttcctcttaaaattcataaggtttattccttctctcatcttcagtatttttatgaaaatatgttttactcttatttccaaagtgcttgccagcccatgctgagttcattagacaaacaatctaggtatcctaatatttaggtaaaattgctagcagcactaactataccagtacccacttaaattgcaatataaacctacaataggaaaaaaaaagtcaaaattatactactttcaattcctacttctggaataattatcacaccttcaaaaaaactcataattgttctccaatattaaaaaccaggaactaaattacatcactatatatatatagctatatagacatataactgtatatagtttatatatatattacatgtcactatatatggttatatatacagatagctatatctctatatagtttttatataggaaactatatatataaactcatatatatttatatataaactcatatatatataaactcatatatatttatatataaactcatatatatttatatataaactcatatatatataagagattttatatgtatatatgagagacaatattgaaataaaacaaactagccaatctccaatgtcccttcattttcccaggactcttctttattctcaaagaaatgtatgaatacacaatataaataaatgttctataatgttcattatggattataatagttttcttgtcatactgaagtgaatgggaattgtttcttcgattattagcatacttttcataactatgtgatttggtgataggcacttttgcttactaagttcagcatgatcaaaacagaactcctattatttttattgttgattcttatttctttaaggtaaaatatgcccttttcctttgaacctgcacactgtttaacaaataagcacataactcaggattgaattgtacacttcgatttgagcttttttttcaaggtcaggacccagtttcacaagaagttttattttttccaatacaactgacatccactcccaccagctgaaagacaagaaaaacttgtctaataaagctttcagattcaatttgctgcctgcatacagcttgaggaatctctggaggtcactcacagcatgtgttgcaaccccaacagggagaagtaatgaaaagattctagttaaaaagctgacactgccccttccaacctctttgaatgtgaatataataagccagtttacagacgcaaatctctatgattctggggatttccatcttgatctctgactccaaggaacatttgaatgcatggatttgtatccattatctgggtgaataaatgcttcatattgaaaaaaggggtgctttaacaacataagtctgatgtaaatcaggcaaaacaacattgtcacttcatgtttaactctcctggagggtctctaaggtctcacagtttggttctattccagtaatatataggcctatcatagccattttcaaaaataatacctgctttcatttcgattattccccctagcttttgcattgacccgaacatacctaatatttatcttagggctaacacgcattaatgccttgctctgtaccaggcattttgccaagtattctttgtgcatttttctgtttaatcttacagcagccttatgaaataggtactacattattattatttttcaccatgagaggaaatgaaagcctagagagaatggttatccaaaaacacccagctactaagtgggcacagcatggccttgaacctgagtctttataaagttcatgcctgtcttttacctttatgttaaacatactgaatcttggtcatgcagtctatgaatgaagactccatatactctaggaccaattctaccatattgtgcatgcttttgtacatattttccaaatgaaattaaacaacaatactctctcttcccctttcttttccgttttgcatgacatctaaatcttttattaaatctccgtgggtggaattgggccttaagtagtagtacctttgaagcttaatactataacctcagagttacggaagtggtttcaatatgaagaaatatatacgttcttttcttttcttttcttttctttttttggctcctctagaatagaaggcaatcaggagagaaaaagacattaagatgataggcttgattctcccacagtgttactacttagctttatttattctcccacatctgtaactgtcaattcaaggtcaaaaagccagtacagcagcagaattacaaaaagtagatctggaaaatctatagggtaccatagtccagcaccctgctgcaagtcaaaatcaattaaataaatatgtttaaacagcacttcatttaatcttaagggcaccacgactcccttggaaaattcttttttgtgttcagacctgattctctgaaagtattttctagtgttttctttgttcggtggctgtggtgaataagtggacccaattgcctacagcatgaaatcgtagaaatgaatatgggctggaacttcaatcaatcacacaaaccagaaacatagagttcatcacctcttctggaaagcgtccccttcggccgtcaaaagggtagagtttcctccaacatatgttcatacttccctttgcctcccatctgcaatttcaaccagtctgttgctctcgccctttttaggcttcacataccggatttcttcttaggagctcacttgaaaaaagggttgtatgctttaaaaatactaaaagtcactggactagatgataataaaatttctgtaaaataaaaagggagttaacagaggtgttaccacttatcataatggatattgttgacctttcctctagccagtgtcccacttaagcatgcttcttggctggaatttatttttctcatctggataaatctgaagcattatagtaaaacccagtgtgagcaaggccatggatgcaagtggattgagatgaatgagtggatagacctgcgtgggcagaaataatgaggtcagcaataagccataccaagggatgcacactcaaggaataaattggaggtagcagaataactgaacaaatgatacatttgatcagactgtcacatgaatatcaactgaaacaagttatgactgtagttagtgaaccctagagtgaagaaaacaaaatattgaaatccatctgatcaaaaaataataaaattgtttacatgtatatattatctaaaatttcccttaagaatgaagattataaattcccgcagttgaggaaactgaataagaggagaatcaggacagaatcttttctcttcgtattcctagtccatttttcttctaactacagtagtgagaacaagaatttattcaccaaatcataatacattgcaattaggggatgccatttgaatcttggaagacacgatttgaggcaaataaaaaatccatatttataaagtcaattattggtttatataatttactgtttcagcgggaggtataggttagtaatgtaagtcacttcaagaaggttttggtcgaagttttgccaattttttctgtaaaaagccagatagtaaatattttgggttttacaagccagaagatctttgttgaagttactcaactctgctaatgaggtgcaaagcagccataggcagtttgtaaatgcataagtgtggctgtgttccaataaaagtgtgtttgcaagaacaggcagttggttggatttggcccacaagccgtagttcactgacccctgttttagataaatactagtcaatagattccttgtagctaataaagggaatatagattgtttaatgtgtttccctaatcttcttaaggcttcctccaggggaaaaaatatttcttatcatcagcagtgttattaatgcttactcagaacaaagaataccacttacttagcatagaatggacatttataaagccactcatggaaagaataaagagatgtgaaatacctggtacaactcttaagagtgttccactatcatttgaaaaaatgatgagtagtagttatataaaaggactcgagcctaaaacatttgttctcactttggataacgttttcctatctcagcatcaaaaaatacaaagaaaggggataactaggtcttagattttctaaattctcatgactataagtcccatatatttagatattgaagtacccttaaatatacctaagtagaagtaataatttcgatattatgggaaatctaattactgctcatagttctcgagattaaaatgttatacaccacatctcagctttctttgaaacttgaaatggcatacttgtacaaaggtagaatggtctcccaaagcagcgtcatagattagcagaaaagagctatgataatgccacttcaactgactatcatttaaataatgaattagttaggaagagttaaattatatagttacaggcagcaggagatgtcaccatcagggggataagaagccattttccagtacactatttgacttaactggtgcagttccttctttaactgtaggttactcatttgtatccttaatttatcaatatactaatctgacaaataatttattaaggattactgtgtgccctcctgtgtgttagattctagggatacaatatggatcaagataagcgtgattcctagactcctagaaagtaagaaaactaaataactgtacgtgacaaatactaggatgtagaatactagggaagaatcaggaagaatcacctcacccagtctggagtattgcaacagagcgatgtcagaggaaaaattctggaaaaaaaaaaaaaaaaggaaatttgaagatgagacttgaaggataagtaggtgtacctaggcaaacaagtaggggagagtgttccaggcaagagaaacaagtaacagttggaggcaaaatggagcctagcacgttttaaaaatatcagtatggctgaagcactgagttggggttgggaatgggtgaggagcgatgtgtcagggaggacattccagatgatgctggaaatgcatgcatgttcgcaaactgcattttaagacatgttagagaaatcaaacacattttatttgaagggtaattgaaagccactgaagcattgtagagagactagtgacatgagcatatttgggttttagagggattactctggctgaagaataggtaactgattggataagagcaactttggaggctattccagtggttcaggtgatagataataatgacctaaactaaagaagtaataaagggaatggagacaaagtagacagattcaagtgatacttggcacgtggaaacaacaggccctggtaactgattggacataaaatggagagatacagagaacgcgaatagaacacccaggcatttggcttgataaaccgagtagaccgtggtagaaattactaaactatggagtattttagggttcaggggaactgtgagttcaattttagacatctagttttgcaaggccactgaggtaactgagcatatgagtcaggagagaagtttaggctaaaaatatggatgccagagttaaccagcgttatgataaaacaaagctgaagtctcgagggtaagaacacctaaacatctaggctggagaaggcagcaggtaaaaagtaaaaggagaggccaggcacggtggctcacgcctgtaatcccaacactttggggggccgaggtgggtggatcacctgaggtcgggagtttgagaccagcctgaccaacatggagaaaccgtgtctctactaaaaatacaaaatcagccaggcatggtggcgcatgcctgtaatcccagctactcgggaggctgaggcaggagaatcgcttgaacccaggaggtggaggttgcggtgagccaagattgtgccattgcgctccagcctgggcaacaagagtgaaactccgtctcaaaaaataaaaagaaagagagagagagagagagagagagaaacagagaaagagagagaggaagacaaagaaaggaaggaagggagggagggagggagggagggagggaaagaaaagaaaaggagaaaaattcaggagaatggttacttccagggagatggaggcgattgtgctgtggggaacacaagggtggggtcaaggtattagcagtattctatttcttgattggggttgtatttacataaagtgttgctttataattattcttcacactttatgtgtacgttctatgtaatcatctatagataagacagatttcactgtaaaagaaaataaaagcttccaaaagattatcatcacaattgtaacagattcccctggtgcctggagtcacacgccattttcctgcactgcagttgcagctgcagtggacagccctgtgtgagttcagacttgcctttagctgacagcatcccatgtcaagggaatggctcccatttttctactttctatctaagggacttctctgacatcccaggagcccacagattttgtgagctttctcacccttgaagttttagtgagtgagcaaccttcaaccaatggagatgggagcccatggatatatttttaaccactattccttccgggggcaaggggaattctctgtgattctcaggaacatacaaaagttctgtcaaaatacagtccccatggtccataagcattaccttgatgataatacatttgattggcatttcctccccctctgtctcactcttttggtttttcattcttgcttcctagggatcagcttccaaatgagctatctgtacccaagtcctcatccaggccctgttttcaggggacccaaagacaacaataagaaaaatggaactgaaagaggagaagactttaaggcatgaaaaaagttcctctgtattccatactgcatatttaactgcctactcaacagttccacttagatgtctcaaaaataatctcatgatcttttactgctatgaaatgcatgaccttcccctgatatattcctttcttcaggttttgtagcaccacttagctatccagtaacaaaatcttgggggtcattcttaaaaccttcccacctcacccctgctggacatccaccactaagttcagttgatttttttgctcctaaatatttcttggttcagctttcatttttagatttatcctgcatacccctgtacaatctcatcatctctttcctggactgttacagtagtcttatattaggatgatcatagtcttgatttgcctagagaaaacatgctttatgtcattgcctcagagtgactaatagtcccacctttcacttgtaacactatgcaggttattgggttaaataatactgtcatccaaacctaatctctcctcattcatttcttctctcctatgcatcttagctgtgtgaaaattcaaaatataaatttgatgacagacagaactctgtttaaaatgctccagtaccttaccatttatctcaaaataaaaatttcaaaaaaagaaatgatatcccacaggatcttgtatagtgtgaccctttccatttcatcatccttataccagatactgtgaactacttactctcttatctccacattgacctccctcctagttttgttttgcttatgaaagtgcttattttctgttttttaaagccattgcacatattggtctctctgattgagacactatccttttgaatttttgacctcatacctactcacttttcaggtctcagctcaaatgttatactcaggaaagacgctccttacctcccaaactaggttagtgtaaatggcactatttatactcctcttccagagcacacaccaaatcttatatttatttgtgggacaatttgaattcatgttgttccccctactcaattgtgagcttcttgaggacatactctgcctcctccttacctagctttattgaagtataattgagaaataaaaactgtatgtattcaaggtatacaacatgatgattttatatgactatattgtgagatgattaccacaatcaaattaattaatacatctagcacaagaaatagttactattgtgtgtgtgttgggggggggggatgaggacacttaagatccagtcttgtagcaaatttcaagtaaacagtaaagtattattaactatagtaaccataatgtacattagatccccagacatcttataactgaaagtttgtgccctttgaccaatgatatggtttggctgtgtccccacccaaatctcaccttgaattgtaatccctgtaattcccatgtgttgtgggagggacccagggggaagtaattgaatcatgggtttgtttccccccatgctgttgtcgtgatagtgaatgagttctcatgagatctgatggttttataagcatctggcatttcccttgctggcactcattctctctcctatcaccctgtgaaaaggtgccttcctccatgattgtaagtttccggaggcctctgaagccatgcggaactgtgagtctattaaacctcttttctttataaattacccggtcttgggtatttcttcatagcagcatgagaacggactaatacagtaaattggtactgcagagagtggggtattgctgtaaatatacctgaaaatgtggaagtgacttggaactgggtaagaggcacaggttggaacagtttggagggctagaagatgacaggaaaatgtgggaaaatttgaaacttcctagagacttgttgaatggttttgaccaaaatgccgatggtgatgtggacgatgaagtccaggctgaggtggtctcagatggagattaggaacttcttgggaactggagcaaaggacactgttgctaagctttagcaaagagactggcagcattttcccctggcctagagatctgtggaaatttgaacttgagagagatgatctgaaattggaactttgttttaaagggaagcagagcatcaaagtttggaaaatctgcagcctaacaatgtgatagaaaagaaaaacccattttctgagaaatacaagctggctgcagaactttgcttaagtaaaggagccaaatgttaagcgccaagacaatggggaagatgtctccagggcatgtcagaggtcttaatggcagcccctcccatcacaagcccagaggcctaaaaggaaaacatggtttcacgggccaggcacagggccgtgctgctttgtggagtctcaggacttcgtgccctgcataccagctgtggctcaaagaagccaaagtacagctcaggctgttgcttcagagggtgcaggccttagtggcttacatgtggtgttgggcctggggttggacagaagtcaagaattgaggtttgcaacctctgcctagaattcagaggatgtatggaaaagcctaggtgtccaggcagaagtttgctgcaggggcagggccctcatggaaaacctctctgctgggacagtgcagaaggaaaatgtggggtcggagctccacacagagtccccactggggcactgcctagtggagctgtgagaagaggaccaccatcatccaaaccccagaatagtcagaaatgctgatagtttgaaccatgcatctagaaaagctgcagatactcagtgctagccatgatagcagctgggagggggctgtaccctgcaaagccacaagggcagagctgcccaaggccatgggagcccacctcttgcatcagcatgacctggatgtgagacatgtagtcaaaggagatcatttgggcagttcaaagtgtaatgactgccctattggatttaagacttgcatgtggcctgtaacccctttattttggccaatttctcccattcggaacaggtgtatttacccaatgcctgtaccccccattgtatcctggaagtaactaacttgttttggattttcaggctcataggcggatgggacttgctttgccttagatgaaactttggacttggacttttgggttaatgttggaatgagttaagactttgggtgactgttgggaaggcattattgtgttttgaaatgtgatgacatgagatttgggaggggccaggagcagaatgatatgttttggctgtgtccccacccaaatctcaccttgaattgtaatctccaaaatccccaggtgtcatgggagggacccagtgagaggtaattgaatcatggaggcagtttcccccatgctattctcatgatagtgggtgatttcacatgagatctgatggttttataagtgtctggcgtttcccctgctggcactcattctccctcctgccaccctgtgaagaggtgccttctgccatgattgtaagtttcctgaggcctccccagccatgcagaatggtgaatcaattaaaactgttttcttcataaattacccagtctcgggtatttcttcatagcagcatgagaacagactaatacaaccaacatcccctcttgtcgattttcattgaatccccattacctgggaatgaatgaggaaggcagaaatagaaatcagcgtattgttcaatatagaaatcctgaagttacacaagataattacgagcaagactcagtacagagaaggaacccttgagctggggatcagagtcttctggaaacaaggagtaccaaaggggagtgaaaaagagaagtggagaatgagtagtagcagtaaaagaggaagtatgtaaagaaatggaaataaagatgaaataaactgtcatcttgttccagagacaaagctagctaggggagctaaggaaatttagagggataaaaagtctcatccaaaccttcataatgagctaagggctagtttttcatagaccctagcccaacttgcaaccctctcactctcttacttttttcctggctctgttttgctttactgcctttcatataatctaaaatgatgttaaatgtatatttcctgtctcttttctatatcacaatataaattccatgaggccattgcctgtgccacatttaccactgtactcccagtgcctagaatggtgcccagatcaagtagactcccagagtgtctgttgtcaaatgattctcagtccagtgatgtttgcactacatggtgctgccacttttttttttttttttacttcattccatttggaatttggatcattttgccaactttagggtttattcctctttatttcccctgtgtttgctgaatatctgactatctatttttctcagctctcttctcctcacactttgcctccaacttcctctctgctacaaattatacttagcacaagactggagccacttttcattgattttgatgtcagtgcttgagtgacaactccatgtggagaactttcaacctcctgctgtctcgttgtttgctttgaaaaaaaaaaatactcatcttcttcctgaacccactgggtaaatttatgctcacaaaaaagacaaaacttctagaacaaaaactgtatgagcttcaaaagtattagttttcccttgattttgagactcaaaagtaccatagaaattttaaaagggggatgaagtaattttgtcattcaacccgatatattttacaatttgaatgtcagaaccatgaaatgtcttttcagtgtactatcatcctcactatttccacctataaaagaaaagcaaaaatattgtttgagaacaaaaaaatattgcagtagcggaaaaattcactttaagtctttttttggaggttgccacatcacgcctgtcttcagctcctctcactgaagattctttgttttcttgaaaccagttggtcacttccaattcttaccacctataaatcttcctggttctttatatttcactttatatgtcccttatctcctctgatttttgttccagtctttcattttttacattctttgtcatcctatatgtcagaaagaatctgccactccaaattccttaatatatttatctaccagtgtttatttgcctgtcacatgtactcttcagtaatccattgacttgaaaactttctactctgtctttcttactatagtttgcttcttgagttcaaattattaatatattaggtcaagtaattctatttttatgcacattttacctaacattcttggtaaatataattgttttttaaattgcatcacatggtgagtattaatttaagacgtaattagtattaatctactggacaagattttatttattaactgttttgccctttgctagggttctgtaatctcaccctcagtgcctttaaatagtcttacccaaggatcacctatccctcttcaatttaaattctctattgtgttagtttctgagattgcacattctctggtttggtttggtttttcagtgatctctgtggtcacttccaaccatttctacttagtttacttttttccctgttagccctcttcagtgttaatatcacctggaagttaacccattcctagtctgcattgctctatggccagcatcttggctgattggccatcacctatcctgtacttattgtcaatttttttaaattttttattgtggcaaacagcacataacggaaaatttaccatctgtctttgttcatgtatgttgctataaaggaatgccagagactgggcaatttataaagaatggaaggtttatttggctcatggttctgcaggctgtacaaaaaagcatggcaccactaccaacttctcatgagggcctcaggcttcttccattcatggtgaagggcaaaggggagctggtgtgtagagatcacatggttagagagcataaacaagagagagaggggaagtgccaggctgttatttggcaactagctcttgcagaacctaacagaatgagcagtcactcaacctgcccccaggaagggcattaagccattcaagaaggatccacccccatgaccccacacttcccgttaagccccacctccaatattgaggatcaaatttcaacatgagatttggaggggacaacatctgaactatagcattatcttaattcaaataattttactaccaattccatttattagagaatctaagattaagactactgaaactatgccaatgattatctctagttcaggcttctctcttcaattccaaactcatattttcacctgctgacaagctaccacgtagatgttccacaggtatttctaactcaggatatgtaaaattgatgttatcattattttctgaaaatctattcctcttactatattccctatttttgtgaatgacacaatctaatggactggccatgttaaaaatcaggaagtttttctggcactttctttattccttaatattaagccccacgataaattaccaatcctttcgatcttgttaagacaaataagcttgaaatttcttatctcttatttagcactgcaattttgttttctcattcattcagatagcatcttctacaaaacctcttcactagtttttctgtctctcagctcatcttgtacactgcaaatccattaaaactacactttttaacatgccaatcataatgtattagtaaaggttgtataatagttctctttctcttctaggataaaagctaaatttttcagcttggtacacaaggccgttcatggatttggtacctactagtctatctagggtatttcctacatcttccctcctctctcttgaaaaatcaagtaatactaaactatttgtaactccctaatcaccaattgctgcctttatactttaacatatattcttccttttgctagaaatacatttgtcataataggctctttggtaaacttaccattacattctcagtttataatattatttgtgtaagtaccttttttcctacttagtcctccaggggaatgcatgtgcttctctctccatattatcattttaaaatttactcctatttcagcaagtatcataatattttactgagattaattgttggcatatttatgttaccctggtgacatatttaatagttaagatgctttgggctgcaagaaagagaatgcactttcaaagtggcttcaaaaataagaataattcaactcacataactggaagttcagaggttaaagctggctccagatgaagtacaagcagagctctgtcactctttctctatgactttctttgtcctgatttttttctctgcgtcagctttgacctcctcactagttgccctccaggttccaagatgactgccagcaacaaatgggtaacataatttcttgttacagtgagagacataaacacttacctcacagattcagagatttcaccctcagataagaacaatcaaaattttaattgtgtatctactgtatcattagtatatgtattaggtattcatatatatctactattgtactaaagatgattcagaatggtttcataagctggttgatttaaacttttcttcctgaaccaagaggatgagattatcttgactggcttagaatcgaagatttaggtgaatctaaatccatctccagaactgaggatggattccgtagaaacttgaagacaattggaattctcctagaaagcagaatttcagagtgggtgtagggatatctttgaatggaagttgtttaagccaccaacaatattcactccattggggtgacactgggcccaaaggtacccagttaatatttgttcaacgaacctataggaagacaatattatctgcaagctatttataaactaaatgacaacgagaagtatttttagaaaagttaatcatatacaatttagtcattcacattgggaggctcttcctaaatttcgtttctgatccttatcttgatctttgacgcaatcatatcttggcctccatctaaaagccagtagaagcctctggccattttttaaacaattggtttaacaacattaattggaatctatatagctcaacttaaaaaaaaaaaaaagaggaactagcttatcataatacaatattgtcaaggcaagtgatacttccatgcagctattcagcatttggtgtattcttggtttctgcagacctaataaaaagagattatctcagcgtcctctaggtttaattttaaaaaacaagaaaccatgaacaatgaaaatgatttcaaaacatcttcactcacatctaaaatatgaaatagctagatcagaggttcttaataatttaatcggtgaagcataactgaaggatttagaaaaagtgcctaaactattaaaagattcttcagctgctgcttaatgttgatatcaagttattttttacactggcaaacagctaagccattccctggtcacatccacttttcagcatttagcgctcctctcaatcatcccgatcacagccccaggaatgtttcatggcatctccgcaataatagtatattactattgggtcctgaattttgaggtagtttatctttcagaaaggatatgaatagagcaataagtccaagtagagtgggctttattaatgatgcccaagattttagacgtatactataatcttcaatcaattttaacaccacttcccttaccctagttttagtctaaaccagtccaactgtgctgtagtctcagataatacaatgttagattttttttttcaagatatagaattgtcgggaaaacttgtatgtaacctataccaatctaaatttcttagcatttaactctaaagagtaaagcttttagcacttcctgtgtaatacaagggcaagtgctgatttctctgaatataattttcctttgttagcacatatgttcactgtttaataaaaataagaatgcttcaattatctccttttgtcaagggcctgagaaataaagaaatatacagagggtcccaatctaaaaatgttttgatttacaatggttcggcttaggatatttttattttacaatggtgtgaaagtaatatgcactcagtagaaatcatacttcaagtactcatacaactgttctgcttttcatgttcaatacagtattcaataaattacatgagatgttcaacacctttaataaaataggctttgtgttagatgattttgcccaactgtaggctaatgtaagtgttctgaccatgttgaaggtaggctaggctaagcaatgatgttcagtaggttaggtttattaaatgcatttttcaatttatgatgttttcaacttatgatgggtttttcaatttatgatgttttcaacgtatgatgggtttatcaggaaataatcccattgtacgttgaggagcacctgtatcaatataggcatttacacaactctcgtactgatagcggcaggaggcagagaagctctaggcagaaaagggatggtccccagcgaaaaccccaccctcaagccaaaaagcctgaaaccgcagctcaaagtgggaacttatatcccagttttcctgctcgaatgttgcctttttctaaaccacccatggccccaccccaccccatcctgtgcctataaaaaccccagactcagctggtagacaggactacagctggacatcagagagaagcagcttgacttcagagggacaacttgatggcataactttagagaagaatccggctggacttcaggggaagattacttgccacccccatccccttttcagctccccttcccactgagagccactttcatcggcagtacaatccctcacatttacaatccttcaatttgttcatgtgacctcattttccctagatgctggacaagagctcaggagccacaagtgtgaatacaaaaggccctttgcccttgctggtggagggcagctgcctcctgtgaaaagacaaatggcccactgagctgttaacgcctaagctgtccgtggatggcagagctaacagagcactgtaacacaccctctggggcttcaggggtcgcagacgcctccacctagatgctgctccagtgctcatgcactccagttcccacctcgtttgcttgcacactccctccagtgaggagttgagagcagtgggctaagtaaataaggcacccctgttgcgagttccacaaaggggtcagggaaatatcctgcttcgttactaagtaggtataaaccctttactaagttagtaattattcagtaataatacttaaatgaaagctattctgttagactaaattcagattatcaaagacacgacagaaaacagctttctcattcatgaacctattatttccttttgtaaaatatgttaaatgaaaatacagccgtcatgctaatttctaatggtagaacatattttgaaaactcctttatgtttggaagattttgctttagtgcagataatcagaatgatgtgatatactaagaaataatttttaaaatgagatgtgacatttctcataatctaaataagaaatggcaaaacattgtcctaagctaaataactcatatgaagtgataaaatattgctttctaaaggtccatgatatgtagtgatttctaatgtgtttaatagcattgatcctattgggtaattgggtggttctaacatgtaaggaaggcctccagtactaatttcatgtactgggaaactactgggcagggatgaatcccttaactcctaagtaagactatcagatcatataaatctgctttttgatttgcaaagactcttaggcatacctcttgagaatattaaacatctactaaattatatgtaaagcatttcagtctaagatttacaatgctcaaaggagaaagattttaaagttcagcattggaatttccataatttccttccaattgtagaattttacaattgagatagcaaataataatataaataaatatgtaagactgaaatcaacataggagtttggaaagaagactgtatgggttaactagagttgtcaacaaagacttcacagaagattgtgatcgtagacattagtaaggaataaaatgggtgcaaaaaaaagtctaagaaacaacaaggataaatttattttgtaaagagtgaaagcatattgggtattacataaagagactggctagtttgacacaatgtgtacttttggggtaagcagtgggaaatcactttctgtaagtaaagtggaagagaattcaggtattggatatggtcatataggatttttcaacctttgttttgcccccatccctatcctaccagtatcatcacagatgttggcaatattcactcacttgcctgaagatagatattcatgtcaggggctacagatatgtaaaggtgaatgaagttaaatagcaaaattcaagcacactagttctgactgtgcaccctctctcactcagaaaagcactttggaatgcgagagtactcttatattgacaacctttagttggttctaatttataaaaaaatataaaaatatttagacaatttggatattttatatctatgccacaacccattgtcaaatgattgagatatcattgtttggcaacaatgaaactgaaatcaactctaagagtaaagagtacgacttttaaagatatttggttaagagtaatgttgcaaggcagagaccaacattatagaagttctcaacctgtgtgctggatatagctaaaatttcccaggaccattgaaagaaattctcaaatccacaaccacctcaagtgttgtctgtgaatcaaaggagtgatgcattacccacaaacatgtagtagacattttttaagtgatgtagatgctactgcaattaataaatgcaaaattatattacaatattactgaattcagaataagttgattttgtcactatttttctcaatctacgcatgctagatataaagttattatatagagacgtaacatttttaatatttcagaagcatgctcatgatattgtaaaccaggcactgttaaaagatcactggattgggaattaataaacctgggatctagtcctcatttgatctcttgttggctatggtttgggggttttgggcaaactattcaaccttttctgccttggtttaattgataaatgatggtgttttcccagataaatcccttcccaacttaatattaccagatgtagcatctatggtttagaatgtacagtataaattaaccttcctgaagatcttcacaagttactataacctatattttcatggcactgaaaactaagtttttgatagcttacgtttttataaataatttacttactcatttttatcataataataaatctgattcactaatcaccaaaatatcatttttgaaaatagatgcatgaaaggatccgaacttgttatggttttatctgttcaagtcacctaattttggtagccacaggcccccattgtcaataggggaagattatccattttagcaatacagtctctgataacttcagcccatatgcccttcaattccacttttacgtcagattgaatgggaatgtgaggcccccagtagtaaactaaccctactttctctttggaaattggtctttctacctagctctttgcctctgttcacgttcttgtattccacagaaaatatatacattaggtgttaaaatcacaatgattaacaatttttaagtagaaatagttattaagtatagcataatcatgcctttgaattagtacaaaagtaggaaacagagctttagtgacttttttcattctttccaccatttacagggcaaaaatgaagaattttaccaattcaaaactatgcacatgtatagtttccaccagtatttagtagttatgtttctcaagatgtataattcctttcctttctgttttctgtagtttgataaaccctagataggagttaatgttgtttcagttaggtttattatttcttttatgtggtttaatttcatgcaataagctagagattttgtaacataacttgataaaaattttctcccttcgtatctttttgttttaaaataatggattaatatagattgtaattttacagtagaggaaatacattttacttttagttcttatctagatatcttaggaaaaaagaaacatcatttttaaggattattatttttctactaatgaaaaaaatagcatgattttccattctggactttgtaattaactttaccttggaataattgaatcttaaatataacttcattgaaaattttattttcaagtaacattttaaaatgcaaaatttgtgtgatctctactaaaaagaactctcacatcccaatgtgcttatagctacaataattggttaaaagagacaaattataaagaagatataggttgtgacattgaaattacaaaatgtggattagggaagtaagcgtgtagagttttgtatgcaatcaaagttaagttattaccagcttaaaaaacccttacgtaagatgtaaagaaaagcaaaaacctatagtagcaaaagcaaaaacctatagtagatatacaaaaggtaaaaagtaaggaatcaaagtatactactgagcaaaacagtcaaaccataaaagaagacaacaaaaaaaggcatatagaacaaaggatctacaaaacaattagaaaacaactttttaaatggcagtagtaaattcctacctatcaatatttactttgaatgtaaatggattaaattcaccagtctaaagatagagtggccaaatggattaaaacaacaagactcaactacatgctgcccataagagactcacgtcatcttttaggacacatgttgactgaaatagaagagatagaaaaagatattttggtttccatgcaaatggaaaccaaaagagaatggggatagccatacttctattagacaaaataggctttaaaaatcaaaaactaaaaagacacaaagaaggtcattaaataatgataaaaggatcaattcatcaagaaggtataacaattgtaaatatatatgcacccaacattggagtacctaaatatataaagcaaatataaagtgataaaaagaaagagacaaactacagtacaataatagtaggggacttctaccccaaattcaacaatagacagaaaatccacattaaaaaatcaataagaatgcattggactttatgctttagatcaaatagacctagcagacatatacagtacatctcatctaacagcaggagaatatacattcttatcaagtgcacaagaaacaattcttcagggtagatcatatgttaggccacaaaatgagtcctaacaaatttaacaagattgaaagcatgtattttatgtaaaacaacgccatcatggaaaaagtactagtgtaaacaaggtttaaatatgatttactgattgtttaaaaaggaattatcttagccctgatctgatgggatttcccctttgtaagcagcaaaaataagttcataatgaagcaactgtaataatacagcttcacagatctttctgaataaacagagttggatatgtttctacttcagaaaccatttactgtgggctcacagcttttccatacactctttacactcttaattttaaacccattcatcaaaaggattaagacaatgagattcaagtccaagacaataggaagtatgtgcatcaaaactgtcatgctaatgctctgaggaacattgttatttcaatagcataatttaaaaccactgaaaccatgttttatttatgattacctttcatacgttcaaaaagaatttgagatggtttggcagggatgtcttaaagaaacaaacaccaaatttttatttgttgtgcttctaacaagcaatttttcctacgtaagtgttacctgttttctccccttgattttgatctcttttgtatggttggtagttgtcgcacttctgggcatagtatggttttctacaagttaaataaaaacataaattgattttgatgtagctagttccactatttcagttagtgtgttttccatacctgcaattcataacatgtttactgacccagaacgttaaaactcaagtttagttcaatacagtcacttcaaaccaacttaagatagcagttacatttccaaggtcattatgaagacggagttcaagacttcagcagttgaatttgtcaagctcatgggtcttttagttacaggaagtgtgcatatttcacataagaaacagcaactctgatgatacattgaaactcaaatatacccaaggagtgtaaaactactttataagcccttaaacaataaatatgccaacaatcctctgcatactttttgtcattttttagagcattcaattgaattatataacatgtgataccaataaataattaactttttatttatttatttagagaatgattcttgctttgtctcccaggctggagtgcaatggcatgatctcagctcactgcaacctccacctcttagtttcaagtgattctcctgcctcagcctcccaagtagctgggattacagccatgcaccaccacgcctggctaattttgtacttttagtagagacagggtttcaccataatgatcaggctggccttgaactccggacctcaggtgttctaccacctcagcctcccaaagtgctggtattacaggcatgagccacagcgcctggcttataattaactttaaaaaatattctactatcgaatgcctgaaaaaatcatattacttctatgtattaaaaacaaactattacgtaaatagaccagagatacggtgtcagagatgagattccttggcaacagtctctgagacaaaaagttgcacacagaaagtattttgagaagtattgttgctatttataaggaagtgaaggaggcagtattgggcagagagaaaagctcatccacactgcagttgctactgaggcttcagcccatgtgacagggacactggagctgggatggtctttcagagttctaccaaattgaggcaaatgggcgagacttttgtatctttgcactagccaagagcaggcaccagggagaaatgcagctgtgatccttttgtagatattattattctggagtcaatgcaaccacaccacaaatactaggaataatattggtagtgtgggtgcatcgactccagaagaggatcttgatgaagcattacagtatccactacagagaggcactggcatattctgcttaccccacaaatattgcaatgaggatgcaagtaggagtagtgaggacataaaataaatcgattattttccactgggccttaatatatcagaaccattggaatttacaggatgatatttattatagtactcaaaaaaatctcttttaaatctccttaactcagaagggaattttaaaaagtccacaattcacctggtctatgaattcccttttaaaataaaatgtggtttaatcaaatttacaagaaaaaaacaaacaaccccatcaaaaagtgggggaaggatataaacagactcttctcaaaagaagacatttatgtggccaaaagacacatgaaaaaaagctcatcatcactggtcattagagaaatgcaaatcaaaaccgcaatgagataccatctcacatcagttagaaaggcgatcattaaaaagtcaggaaacaacagatgctggagaggatgtggagaaataggaacgcttttacactgttggtgggagtgtgaattacttcaaccattgtggaagaccgtgtggcgattcctcaaggatctacaaccagaaataccatttaactcagccatcccattactgggtatatacccaaaggattataaatcattctactgtaaagacacatgcacacgtacgtttgttgcagcactgtttacaatagcaaagacttggaaccaacccaaatgtccatcaataatagactggatacagaaaatgtggcacatatacaccatagaatactatgcagccataaaaaaggatgcgttcgtgtcctttgtaaggacatggatgaagctggaaaccatcattctcagcaaactaacacaggaacagaaaaccaaacaccgcatgttctcactcataagtgggagttgaacgatgagaacacatggagatgggggaggggaacatcacacaccagttgggggattggggggcagagggagggataacgttaggagaaatacctaatgtagatgaagggttgatgggtacagcaaaccaccatggcacgtgtatacctacgtagcaaacctgtacattctgcacatgtatcccagaacttaaagtataatttaaaaaatgtggttgaaaaacaaaacccacataatacaaactttgccagcttaactgttttatgtgtacaaaccagtagtgttaactatacatacattgttattcaacagatctctagaatgttttcatctctcaaatccgaaactccaaacccactgaagagctcccattgctccctgtaccccagcactggcaatatgaccactctactttctgtctctaaagagtttaactactttagatacatcatataaaaggaagcatgcagtatttgtcattttatgactggcttatttcacttagcataatgtcttcaaggtacacccatgttgtagcataggaaaggatttccttctttttttgtggccgagtaataatattccgttgtgtcctataccacattttttaatccgtttatcaatcaatggacattttagttacttcaatttttggctattgtgaattatgccgcagttaatatgagtgtgcaaatatctctttaagatcctgtttttaattcttttggatatacagatgctcattgatttacactgggattacatcccaatcagcccatcataagttgaaaatatcatgtcaaaaattaatttaatatgcctaagctaccaaacatcattgcttagtctagcatactttaaatgttatcagaacatgtagattacagtacatctgggcaaaatcatcttgcaacacagtacatagtagagtatcaattatttatcctcatgataaatatcatgctgcaacccaatatgtcagaagagagtatcatactgcatatttactagccctagaaaagatcaaaattcaaaatttgaagtatggtttcttaatgaatgcatatcgctttcacaccattgtaaagtccaaaaattacaagttagaccttagtaagttggggactaaccgtacacccagaaatgggattgctggattatatgataattctatttttattttttgaggactggattatatgataattctatttttatgttttgaggaacttccatacggttttccatagtggctacaccttttcacattcccaccaacaatgcagaagtgtttcagtttctccacatccttgccagcacatgttattttctgtttatgatcgtggtcatcctcatggttgtgaggtaatatctcattgtggttttcgttcttcatttgcatttccccgatgattgacgatgttgagtatgttttcagatgcttgttggctgtgtatatattttctttggagaaatgtctatttaaatccttgcccattttaaaatcaggttaattgtttttggtgaattccttattaattactcacctcagagcctttcttcttaaaatacagatttctcagaacctttcatctaatttactaaatgttgatcttgaagaagtattttaatttatctgaatttagtttcccgttctataaattgatagtaatcatgttttccctatccacaccagagtggtatgatgaggaaccaatgcagaaaatgactaaaaaggcatttttatgctgtccagatcttgtgcaaatatattataattgatttgaaccaaaagaatctacattttaagactatttaatattgtcgcatttacattgcactaatggttcctcttttttctcactgatgaagttctagattgaaactctgaggaaactgtaaatcacagttacataactctgttatattaatttatataacttctctgtctctctctaaatatatatatttagactatatatacatatgcatatatatatttagagagagaacgagattacacttaaggactctgcttagtacattgcaacttgcacctcattctaattgtgaaaacaacaacaaattttgattgagaccctgttatttttcagacctttggtcttgtgaggaaggaaaagatgattctgatacttatctcaaatagcttatcatctcctctggtggatgaggcttgtgagggcctgacacatggtagaggatcttattcattatataacaactttcaaaacacatcactaattatttttctgcttaaggtgaaaacgtagctctcccaaacaaataagagatttagactgaattctgtagaaaacactgcttacctcattttgcttagttttcactgcagagtcttgtctctaacattcaggtaggaggaactctattttaaaaaattgaataaacaaacccaaatcagaataaattatttaattcaggagttttttaaggtgctcagaattttggtagaatagcagtgtattttctgtaataagaactacacaatgttctctagctggttatactcaaatggttatatggattttattctgatatcagttttgcaattgatgaccacccttcatcaatagcgtggtctttattatggtttcatctggctttttcttcccttgtcttctgcactgggctgcctacttcttggctcttattattacatactctacttttttcatatacaaaggtcttagtgcattaatagtgagtttctgctaaaagtgttactttcttcaaatatcctgtcaaatgctggctgcctgatttattgacctcatagagtgactatgtgaatcttccattctctgtggaattccattccacattttaacttaaagactccgtcttttccagctgtgttctctctgctggataagcatttttcttttaatttctgtggtaatgggaagggaattttaaatcctgttttgcgtacaagtgtttaacaggtaaaaatggatgctgtgtcagctatctattgctgtgtaacaagctaccccaaatgtagagacttaaaataagaatcattttttttttttagctcatgattcttgattctgcttggggcttggttcatcgaggcgattcttttgctagactcagctgtgctcattcatgcactcgtggtcagctggtagttgatgaccacatgtggcattcatatgtctggtataactttttggttataagttgagacggtgtgggtgacaggatcacttgcctgtaattattcatcaggctagcatagttccatagcggtggaagagttccaagcatagcccaacacccaagcattgttaagcctctgcttatgtcatgtttgctgatacctcattagccgaaacaagtgacttgaccaatccatattcaaggagtggagaaacagactatggctcttaatgggagaatctggaatatctcttgacaaaagtgtagatgcaagaggagaatctgtggacatttactctccagcagagatgttgtcatttttgtcactaagacagttcctgtgtaatattatttattattccttggcagccataagtttgtggtttacttatggatacttcagtgcctgcccaatatcatgttggaaagagaagcccttaacaatttctcttaatttctacttctgaggaatgagaaaaaaaaaattggataggcataaatgatttccagcacaaattctaagcagctatttgagaggtgggtgggtagggagagatggaaaatccttttaattgagacatgctcaaccataagcaatttttctttcctcaggagacatttggtaatgtcaggagacatttttggttgtacatctaggagggagctctggccagagatactgacaagcaattctgatcctacaatgcacaggacagccactcacgacaaaaaattatctgggacaaaaatgtcaatagtgctgagattgagaaaccctgcttttcactgagcgcatgtagatgaattcatataatgttagttatagaagggcacttagatgatgccaactaaaacaggaaaaggcaatgattatttctctattcaagttagtgaaggaaggatatgtttaaagtcaggttggagatatttctcaagggtaatatttaagttgtgagtggatgccagatgcgcttgattgttacaatccatatttttatagctatatcaaatgatcttctctcccaaattaaaatggatattagatatatttcatggataccatatattataagctatagctcttagaagtatttgagtgattaataattcttgcatattgaatgagacatgtaagaaagatacctgatgtcctatgattcttagaaatatgtgcagtggttaagcacattgtcttggaaacatcacttgttaatgtgagatcctgaacaagtttcgttaccttggtaaaagggggatgataacatctaccctgaagatggtttggtaaaggtgaaataaaagagggtttatgaagaaccttgcctagcacataagaatcactgagtaaatgatgggggtgatggcagtgttggtggcaattatcttacttgtaagtagtagcaaatatttatttggattatatttttaatagcaagaaagaatctattaaaatgtaagcaaatagcaccattaagctttaaaaatccatagctcccaaacttaacatttttttttcttaaatccagaaatacaaatggttatcatgaatccttgagttccagtactccggccttgcctatgtagagtacaagcatttatttttctaaaatgagaattattgatgttaggtgtgtcatatattttatttactctttagagtgacagaaaagaaagcagacaaaaataagtgtttatgtgttcatagtgtttgtttctaattttccaacttgtatgtgcagactgtaaatatttagagggaagacatgaaattcttccttacctacacaatagattgtctttcttagaatctagacatgatttcaaattttcttcagaagttctcttgaattcttacggaattcattaatccaaatgccatcctttcaaatattcaaaaagaaaatattctccaatgttgcttacatggaggagagttattttatctactagtgagatggaagtcgctaacaatctttcttataccccatagtattaaatagtaatgcaatttgatcacatataacattgctctcctgttgacatggaatgataaggaggaagggaatatctaacagcactttttagatattctctcatagaattgttaatgtgagcccaataacttattttgtaagttgagtgatttttcaaatataaaagtgaagcaaacaaaaaaagttacccacattcattcaacaaagctagaaatagagtatgtgcttcttgctttcttatcaaccaaaggagacctgtgaattacaggaaaaccatgtgtgaatacttcaaaggaaatatgccaaacacattgtgtgtgtgttttaaaagatttagtagctcctttaaagctctaagtaaagctgttagtctgactaatcatgtacccctgaaaccaattaaattttcagactagagaagtgttcttcaaacacttgaaaaaaataagagttccttcctaaagccaacaccttttaattaacaaaatactcagagcaaagctgtggtttgcaatagtatattacacctactgttattcatgctaccattctggtgtgccaaactcaattcatttcaactattttgagcttgattttctgtctgcttaactatggagggaaaaccacaattttagtagagtcattttaattttctaatgaatgcatgagaaaggtattatgctacatagtatgtcctcagactattcagatgccctctctctctcttgctctgtctctgtctgtctctctttacacacacacacacacacacacacacacacacaatgtgtgtatctatctgtctacctagatatacagtttaattttgtacattgtaatacatctggttctggcataaggtgattgagcaaaaaacaaacaaacaaaacccacccaaatctgttactggaggaacctttaatagcataacatcagaaagactattttcagtaaggaccctaggcaggaaaagacaattcctccaatggacttgagaagaatacccttagtctctgaggtggttagagaggctgagatctgaaccagctaataccagagccagcttcttgtaacccaagataggggcataagaaacggggtgaatgcccaggcatgaacagacttggggttaagattaaatagggtacacgggaaaggatttccgccagctggaggggaagccatttcccatgctccttagggatgacaacaggagacccagcccagaacatcattgaaaattctatgtaataatttatatatcctaactctttacccgttcgttctagattatggattcaggcactcttagcaaaacaaatcctctttcagtcttttaaaatattgacttaacaggaaatatccttggcacaacaatacgaccctgcctgacccttagaactgtgaacaggttgctcagactgtacaaaaccactaacaaatctgaccagcctacacttcactgaaaaaggtgatttgcatatatttctagtactatgacatggtggaaaagaaagaaccgcatatgtgttagataaaggtaaacgcatctgaaagtgcagtaagaatcaatgtgatatatacaataaaataagataaataggccgggcatggtggctcatgcctgtaatcccagcactttgggaggccgaggcaggcagatcacgaggtcaggagatcgagaccatcctggccaacatggtgaaaccccgtctccactaaagtacaaaaaattagttgggcatggtggcaaatgcctgtagtcccagatactcaggaggctgaggcaggggaatcgcttgaacccgcgaggcagagattgcagtgagctgagatcacgccactgcactccagcctggcaacagagcaacactctgtctcaaaaaaaaaaaaaaaaaaaaaaaatttcaggacttcaaaacttctgtcctttgaaacactttgattaaaaaatgaaaaaaatatatacatgcctgaatccagaggcaagtctttttagaaaacataaaatattttaagtaatgtttttctgaacagaaatggctctaatgtgagaggtcgatgaagattagcctcttgcttctttatgttttaaagtatattccttgagacccaaagtttctgactttagaatccaactctcaactactatcagctatcctctagacactttcaaaatcctccaaaacctaatagtggtgcaagattttgtccttcctagtgataactagatttaagtaagaaaacgttaaagactaaaaagtgtttaggacccacaagaaaggtgtaattctgttcctcatggagatattttagttacacacttcttattctggtcctccccaaaacacagaaatctagagttgacatttaaagagaaaatgagatttttgtctggaaacaggagagaaaaagttttcaagaagtatagaaagcgtatgaaaggacacaggtttgaaatggcctgtgctcatgagagaatgcacaatagacatgggtgtggaggagcctggaaagaatggagagaggtaagtctggagggtcaaatctggttcagagtacagagcataaaatcccatacgaatgtagaacatgaggagccaataaccattgtgtgagaaatgcaggaaaaagaggaagaaaaaaatccacatagtgtacttacagtcagaacaatcctaggaggtgacttacatgtatgatgtcataaaatccgtaacacaattccattagattggtactgttttcatagttacacaggtgaaaacttttgagggtcaagatgttcattgtagcaggcatagtataattccttacctcaagatgcctccaatgtcagtgaacattacttttccaagattgtctatttaggaaaaagtaaggccagttgtctatgaaggaagtactattataatcgccactttacagaggagtaaatggagattcagagaggttaagtcatctgactatagttacacagctaaaaaaaaaaaaaattatagagcaaggattcaaatacaacaatctggtcctagaaagcctaaatattctacaccctgctttctgattcagagctatttcctgcttttctcccttcgataggaaaaaaaatgtatgtgtgtggggttgggggcaaataaattgactggctgtattttctctctttaatatttgatctttcattgtctgctccaagcagtgggtcttcctccattatcttctcgtgaaaatagctaaaatcacctaactagtaaaaacctaggcatgttttgtgttctagcctccattcttccattctaatgggtggctgttaaattttagtactcattgtatgtagaagacctctaagttcactaaagagcttactgcacattgacttttctttagattcaaagggaatcaattgagcacctcctatactccaggacatgtgcaagatgcaagagatagagcagtgagaaagtctgataaggtttcccctccctttcccagcagtgtacagatagatgttcttcaggtggtgcatgctggagaagagaagaccagaaatactggcctgacgggtctatagatgagattatctgcccatgactggcgcagggatggccgcattgctagacctctccatcatcctctgaatatgcttcagctaatttatcatcccaatggcatatttagtcatcatgaaccattctctctttttgagtctcaggccctggccttgcttttcaatagacttccaatagattccttcctccttccttcccttactgcctggcttcctgacttccttccttcctgccttcctgccttgtcttgccttgcttttcaatagattccctccctccctccctccctccttcctccctccctccctccctgactttcttctttccttcttcctttctgtctttttccaaacgtgcttttcaggaaacagtggtctgcttgttgaagtctgataattctctagttcctcatccttcactttattgaaatttagtgtgacatgatcatttccacctcattaggtacttctttcatggtcagaagtaagtctggagaaaaaaaaaaaatctcttgtctctgctcttatttgagggtcaaattttcaataagtcactttttaaaaaagcattttctgacacttcccataagcttgaaatcctcctaaattgctgtatattgcctcagtataccttgtgtatctattttaggaacactccatccacatttgccagtcagcctggtgttctgcagttagttcctacagtgatattttaatttagctctcttttcatcctcacacatgcatcctctctggatatttagctcctttcctggaatcccttttaagatttctagatctttttgcttccatgatttcttctcctggactgtgacacaaaatgctatttcttctttacattacatttaattctttctagaaagagcctcagagtagtcagatagctttgagaaacaaaactttttctttattgcctcactgttactgcctttcaatcattgtttcgtgacacaaatttttttattctctctgacaattaaaacactatttttttctgtctgcattgatcaaaattagttccttcattcatagaaaactcttggtgtccctgagaagcttgagagacaagaaacattcttccattctactcatcttcttctctaatgaggagacaaccttaaaagcacagttacatagccataaaaattaatgattggctacctcagaatgaaaattcaatgtctcatttttttttaatattcttagaatcgttcactggttgtccagtgtgagtctcctgttgagatgtcttttgcagctttccttgaaacctttcattccaaactacatagtccaataattttgccaccaatcttctggttatattatgctcttgagtctgttgtctataaacttgattaggcattccttcccctcaccactcacctctgataacccagctgtgtgttggtatttagtatcaattcacaccagcaagttcagccctcttcaatcaatatagggccacacacggacttttgactgactactccccaagtatttcacattttggggccttatctccagtttctcaccacagttgttcatcactgtgtttcttactagccaggcgtttataaaaacagtaatacctaacactattgatcacctactatagtgtcaggcgctgtaataatattattgtgatgatgatgattatgctgctctttctggcattgtcatacgtgtattgcttgtactactcactgaatctacacaactgcccttatgacatttaccctgttattattcctcttttaaggtaaatacatgaaaaatgcttcccactttgccttgcttactgcttattgctagtactgaacaaatgttagaactgaaacttagagaggttatgtggctttaccaaggtcccagagttcctagggcagagaacaggattgtctaccagacattttaattctagtactatgcatcttaaccattaccataggctgacttactctacagtgtccaacactattcatattaagatttatttaatgactttgaaacagtatttcatgtctaaatagaaaaactactaactcgcatttttaagaaaatattgtatcttggtttttcttcactgctggccagtttactaacaatctgaaataaaaagaaaaaaatatgataaactgctcccagtataaaatacagagctaagacaagaacgtttcattggctttgatttccctagggtccagcttcaaattaatttacttcctattcaagggaattttaaatcagaaagaagatcttatcccatcttgttttgcctttgttttttcttgaataaaaaaaaaataagtaaaatttatttccctggcaaggtctgaaaacttttgttttctttaccacttccacaatgtatatgattgttactgagaaggcttatttaacttaagttacttgtccaggcatgagaatgagcaaaatcgttttttaaaaaattgttaaatgtatattaatgaaaaggttgaatcttttcattttctaccatgtattgctaaacaaagtatccacattgttagaaaaagatatataatgtcatgaataagagtttggctcaaattgttactcttcaattaaatttgacttattgttattgaaattggctctttagcttgtgtttctaatttttctttttcttcttttttcctttttgcaaaaacccaaaatattttagctcctactcagactgttactctggtgacacaacctgtggttactaaggaaactgccatctccaaactagaaatgccatcttccttgatgttggaggtacctgctctggcagatttcaaccgggcttggacagaacttaccgactggctttctctgcttgatcaagttataaaatcacagagggtgatggtgggtgaccttgaggatatcaacgagatgatcatcaagcagaaggtatgagaaaaaatgataaaagttggcagaagtttttctttaaaatgaagattttccaccaatcactttactctcctagaccatttcccaccagttcttaggcaactgtttctctctcagcaaacacattactctcactattcagcctaagtataatcaaggatataaattaatgcaaataacaaaagtagccatacattaaaaaggaaatatacaaaaaaaaaaaaaaaaaaaagcagaaaccttacaagaatagttgtctcagttaaatttactaaacaacctggtattttaaaaatctattttataccaaataagtcactcaactgagctatttacatttaaactgtttgttttggcactacgcagcccaacatattgcagaatcaaatataatagtctgggaattgattattatccactcttctaagttgtctgtgccaatttgccttctccaatgataaggataattgaaagagagctataacttaaaaagagaaaagtaacaaaacataagatatttaaaattaccctagatcttaaagttggcatttatgcaatgccatgttcaaatgaacatgtttttaatacaaatagtgcatttttcagcctcagtgtaatccatttggtaaaattatgacatcaactagaaacattagaatacattgatgtaaatatggtttacctagctagatcaaatatactatatatcttttatatttgtgaatgattaagaaaaataatgttggaattgttatacattaaagttttttcacttgtaacagctttcaagcctttctaaagaaatacaaagttgtgctgaaggtatttaggtattaaagtactaccttttgaaaaaacaagaagtgaggcagacagagtaaggggaatttctttgtaaaataaacttcaccaattccataggaataaaagtaatttgatagtaaacaacctgcatttaaaggccttgagcttgaatacagaagacctgaattcagtgccatttgcaaatgatgattgtggtcaagccatctctggatcttcgtttcctattctgagtacagagcatacagagtacacattcacattcacaatatagttatggatatggatgtatataaatatatgtaaatactacatatatgtacctaaaatttgttttacttctgctttaaaaaaagtaattatagccacatttttcagaaaaagtaactgaggctcatagatgtcaaattcccagtaagtagcagaacaaggattcaaatccaagtccatttgattcctaagcttgtgttattacttgctactgcagagagtatacgtagcaagtaatatatgtactgcaagcaatacatactattgctgcggtaataactgtaactgcagttactatttagtgatttgtatgtagatgtagatgtagtctatgtcagacactatgctgagcattttatggttgctatgtactgatacatacagaaacaagaggtacgttcttttacaataccatattgagttatataatactcccaggacttttatttaccaaaggaaacaatattttataatgtttaaagcccaggttttgaagttacattgtctgggttcaaagcttggctcccaagctgtgtgaccttgagtaagttattctgcctacctgagcccaagtttatctagctataaaatggggatagttgtactatctgccttgcagtttgtcatcaggattaagttggttggtacatgaaaaatgcttcccactttgccttgcttactgcttactgctagtattgaacaaatgttagtaattatatttggttccaccacgaactctagaaatctaaccaatgatggcatttgtattatgcaaactgtatatcacatcataatattatatggaaatgagagcttgtttccgcttctgtagcctagtctaccattgacatagcttcctgcagaagttaccagataatagattgggagagaaagtccacacttccttgtgacgggtttgtgagtccagcatttagggaagccattgatgtgctcagtagtctccagagttctctaaataaatgtgtccttttcagaaaggactactgatttgatgccccctcacagagatcgtctttaaatataggtcaaaaactaatgtagagggccaggtgcaatgtttcacgcctgcactcccagcgctttgggaggctgaggcaggtggatcacttgaggtcaggagtttgagaccagcctggtcaacatggccaaaccccatctctactgaaaataaaaaaattagctggtgtggtggcccatgcctataatcccagctactagggaggctgaggcaggagaatcacttgaatcctggaccagaggttccattgagctgagatcacaccattgcactccagactgagtgacagagtgagactccatctcagaaaaaaaaaaatttagggggaaaaatcaaaagccatttctgagacacaaaaatacaggatttataaattatatatggtatatataaaaatatttttaaaatagtatatatagcatattatatataatgatatgtaatgttcatatattacatatttataaaaaaatctaatctcccttctcttgcttgctgaatagggggatgctttgcctgcctcttcctcttatattaaaaaataattcttaaagacattgtcagttcttggcttttatagcctcaatcaccaaattgtcggtaaaatggccctaaataatcattaaacaaatgtgtgtgagaggggaaataagaaggataagtaagtatggggaggattttgttataatttcaggaaatcaatatcaattttatgtaaagttttaaataaagcaatcccaactttaatgtttgatgtgtgaaaaattaggcaaaattccaaaagggctttataaactgaaaaaaactttactaacacctatccatttttattattttaaccaacttctattgagctgccactaagtacctgggaaacataaagttgtacaacatagaatgtgcaggtaaaagaggttgaaggaagaaaataataacactatgatagagataaattttaggataatagctaacacatatgatatgccagtcattgatctaagtacttcacgtgaattctttaatgcttacaacattactgtgaggtagatagagaggcacagtaaggataataacctgcctgagatcgaggaagaaagacaatgatgagatgtgaactcaggcagtttggttccagagtcctctcccttaaacctcatagttttcaacttctctgatattgtgtgggtgatgctgttggggctttcttcagggaaaactaagccaggagagagaatggatgctagtgagatattcctgaagaaggaaaaacttaagccaggcattaaagaatgagttggaattacctagctagataaaacgagaagggcaatccaggcagagggaacagactgtgcttttcactgaggtggaaaaaaaacagagtatatcagaggaattgtgattccatatggctgaagttaagggtatatgatgaggaagaaattgatgaggttgaatagagaggactggggctaaataatgggaatcctttgttgccagactgaggaattttgatgatggcctacaggcagtggcaactctgaaaggattgtaaacaggaaaataaaatcatcacatatagtttagttgcctatcaattagagctctctggatgcaagcaacagaaatcattctctgattaaatcaggcagaaagtaaatgtgctgtaattagcacaaaggcattggaacaaaacttacaaaaggaaaaagaatctgagcatgcctttctgggcatgtggctagcaagaagtattccagtctgtttgtgatactctcttttctccatcctgtgtgtaactctgttcaaattttaaagtcttaaaagagagtccagttcaccttgtttgggtcacatgttaatacatgagctagaagggagcagaaaactttgatttaaatccctctcctcccaaagtctcaaaattagggaaaggcaattctcctgaatagaaactgggttctattgacaatagaagaaggaaatgattctgaccaaccactaaacaataattgtccactgaactcagtcaagaacatgtagaataagttggaggatagagcaaataaaggagatttgtaggaggtaattattatgatctaaagcaagcttgttcaactcatggcctgtgagccacatgcgtcccaggatggctttgaatgtggcccaacacaaatttgtaaactttcttaaaacatgagatactttttgtgacttttttttgctcatcagctatcattagtgttagtgtattttatgtgtggcccaggacaattcttcttccagtgtggcccagggaagccaaaagattggatacagctgatctaaagcaacaggttcatctactcaacttcacaacgtgtagacctgaaataaagaccattcatataccaatacctgaaatataaatttgtttgaccatgacacgtacagtaattggttctcaataaatgtggatagcttgatggataatgtgaatgcaatgtgataaggaaacttcatattcaacaaagactggaatgtgaggattataattccaaagcaccagaagatagataagataatgcaatgagacattttatgactcaaggcaaagttagttatgagattcagaccaaaccttagacgtgcagtaattgaaatatttgccacagaaggggtataaggacatgacattcaagtaagctaacctttcactagctttagactttgaactcagaaaacatatttggtgaaaagcttatggtcccctttagtatgtattgcttgattaaagtattattttagaaaatggtgagctgcttccattttgaaataaaaataatttttactaagtgaattatattcagtgaaaaaaatggaagctacaattacaactttaatttttttaagttttaagaatacagccatttaaaaaaattaagcaaatctgcttcattttagacagtagaaaatataccattatcttttagaagaatagagatgtgaaatatgcaaattaagcctttagaagtaaagcacacatgaagttcaaagtttaatttctagaattgtgaatcaatagcagtggatgatttgtactttatagcttagtgtcggagaaatctgattaaaaaatgctttttctgtttcatcacataaacataagtaaaattgctctgaaacaacaatatttgacaagaattagcagttttcttttttgacataatctatcaaatgaagggaaaaatatgtcctgggttttgctttgagagtgattactaaatctgacccttaaggaaaggaaggagagaacaaagaagggaggaaagaaagggaaggaaggaggaggaaagggaaaaaaagaaggaagagaggaaggaaagcaggaaaaaggggaaggagagagaaaagacaaaagaaaggtagcaaggaaagaaaaaaagacaagaaaggaatattaaagaggacaaaagaggagtgaggaaaggaggaaatggaagagggatggtgggagacaggagggagaaaggtggagggggaaatatgaagagaggttcccagcagtggagactagtgttgctatcaacaaatagaatttagatggccatatgatattatttttcataatactggtgtctgattgcctgtgctgagttaattgtagtcttttttttcaattccgtttggccaggtgttcaggataattcaccacaaaatctcaaccactgcacttgtattgaataaagaattgagttggcaaaggcattttatcctccagtaagacctttccagattggggttgagacaaattggccaatctggacaagatgataatagcattgttcaagattaatttttaaccacacattgcactgttacctgggagatttcattatctaaaaattgaatgagcagttttagtgggtatagtgtatatttaaatgggacataattacttgaatgagtttaatttttgttgttgttgttaaggtcaaagtacttaaaaattatgattttttaaaactctgtctatacacaaaaagcatttgaattagctacagaataattctgattataacttttggtgaatagattcagtcaaaatctgattactaaacaacttgtgtagtatagccctggaagaattgatgggacaatgtgtgggtaaagtggcattggctatttaaactaaaagcaatacaaaacagaatgtttcttggttttattctgttgtcacaaacccagcagaaagtggctattacaatagtttcccttattcaacaaatgagagaagttatagacaatttagttaattgatctaaagtcacttagtaaatgtaattgtcctaacataaacccagacccccagacctcttgggaatagataatgtttcttacttcttttctatttcctcagccacccccctcaacttcttacacatctcatttctccatccaaattataacaaaacaaagcaaacatggtttatttccatgggcatcaaatggatttcacgaggttgggtgacagtcatcttagggtgaggagattgattattctgtttttctctttcatcgatcaacaatccagcccttctcatctcatcatttcatttctgcacaaacttgtttaagaaataccaattaagaaattaattaagaaattaatgttgtaatctgtttggctgaagatatttacaaattttgtgctttaattatcttccaacaaatgtacatgtctctggtagacagcttgcgaccatctggatgactgatccatatttatataattttctttctttacctaatgagaccaaatccactattatcttcaacgaaggatgtaaagatatgtcagtgtcagtaatgtgacttattttatattctctggtcataacaaaaataaaccgccccttaaataaaaaggtcatagagttgcaaacacacacacacacacacacacacacacaaaatcatattttctaagtctcctaattacctttttatggaaaatgataccatatgcttttttcttaaagaaactacataaacttataaactatactaaactacacatttcaaagtctatgaatggaaatgtgtatcttattatattttaattcaattcactgtaaacttttctgtcaaaatcttatcaagcaaaactgatccaggatatttacatgaattctgatggaagtcactgtactgtgttttccataaaataccagtgggattctgataaggaagtttatgtttgccattgtgtttaaatagagaattctgggccgggcatggtagctcacgcctgtaatcccagcactttgggaggctgaggcgggtgtatcacctgaggtcaggagtttgagaccagcctgaccaacatggagaaaccccgtctctactaaaaatacaaaattagccgggcgtggtggcgcatgcctgtagccccagctactcctgaggctgaggcaggagaatcgcttgaacccgggaggcagatgttgcagtgagccgagatcacaccattgcactccagcctgggcaacaagagcgaaactccgtctcaaataaataaataattagagaattctatttacaaatttcctttcttggatctagttagggctcctttatatggagtgatttttattgttttcatagaaatacgtagaatctgggtcttctctaactttcttacaggaaagcaatgtaataaggtttttttttaattttctgaaagttatataatgttattgttccctaaagtttaggacctgccttttaggctttccatttcaccataacttttggtccttaaagtctgtaattgaagttacagtgtgttatgatgtaaatttttcttattattacctttaatgttagggtaatgttaactaatgttaatgttaggtatatggttgtttttttcattccttcgttcaacaaattgtctttgaaacccatgttacaaagcactctagagtcaggttgaagactattaagaaaggagaatagaaagagacactagagtaataatttggatttaaatttgatttccttgtgtatgatagtgaataagtgtgaataagatgaggcagtgatcacacatcactattagtaaaagtgtttctgtacctgtatccacacttttatgtatatggttacttatgttaaagtgatacatattatataaaattaacgtatacattaagtagatattttaatagtctgtaattaaatactactagtattttctttcctccttcaagtgcttacttttgatacctcgagttacagtgtcataaagattctttagaaatatattgactgtcttttaagagcttttgatacaatactgagtttacattcatctgttatttattgaacacttgctggtgaaaggcatcagtgttatctgctcttagggaacaaaaattaaaaagggataggccctaattttagagtgtatcctctataagaaaaacataaaagatagggcagtcatggccacaaaagaaaaaagtgttatggtggtttcaatcatatatgtattagaatgaataaatcaactgatcaattgtgatttcttattctaaatatgtgcctgcctttttcatatagatgaaaattaagctatgtttatctttccagggatcttgttgatttttattcaataacttgggagtgaaagttgatttttgcatatgttttaatgtttttaaatttcataaatgaattgatcagtaatttccaaggtagtaatggctgcattgtttttgaaaaaaaaaaagcaacaggatttgattgtgcttttatgatttttaaagaattcattaaaaataatgccacggtttctaaaatgatttgagtcaatttcttattcgatttataaaaataactttgaatacaattttagtaattcacaaatgctttcagttcccttacctttatattttatattctgtgtaaacaagtgacataatatttaagaattatatatctcctatgatttattcaagaaaagaatatatactgtattatttatttcaagaacagaaatgctttgatttaactgtcatcttctctcttcaattatggaagcaaaataaactgtaatgaccaatgtaacccctcccccatatcaagttaatctatgttcaactccagaattatttttgaacactcaaactagaaattaaaaaaaattaaatccatgaagacgatttttgccaaaagcatatagataaattgagttgattctatacttaagaaagtggagaggagagagtaatttggagagagtaatttactcttaatcccatattttttccctaaatgtgaaagaagtagattgtagtgagagggaaaataacctgtagcaacttcattgaggctaagctttctgtcatgttatattatacgaaagtaatgaaatgcttccacagatagaatcagaagtcccctctgagaaattctacataaaaattagcctgccactttaccacacttactcaagtttgatttttttaagttatgtaatagatgttaggcactagaagaggacatttactgggggcaaagatcagtagttggaaagaatgcaagcaggcaagaagctatatataatgagattttacagtacaattgttttctaaatgaaaatgaggacgggtccagacacaatggctcacacttgtaatatcagtgccaggatggaggatcccttgaggccagaagttcaagagcaacctgggcaacagagtgagacttcatctctacaaaaaaatgaaataaaaagttagctggctgtgatggtgtgggcttgtagccttagctactcaggaggctgaggtgacatgatctcttgggcccaggagttcgaggctgcagtgagctatgatagcgccactggattccaacctgggcaatggaacaaaactccatttctaaaaaagaataaaatataaaactaaaataataaataaataaaaatgaggatatattttattttaacatttggaaactttgtaggtgaggaccatgcaaacattcaaggtgtgagttctgaccaaatccaattattaaccataccaatgacttaaggtttcttcacactccttaaagttgattaatataatgattatatagttgactggtatgtcacagcttgaagcctttgagatttattcctgccttttctgtaaaggttgttttgttaattccagtatgtactggtcgtttttgttttgttttgtttttgtttttgttttgtttttttgagatggagtctcgcactgttgcccgggctggagtgcagtggcacgatctcggctcactgcaacctccgccacctaggttcaagcgattctcctgcttcagcctcctgagtagctgggattacaggcactcaccaccacacccggctaattttttttatttttagtagagatggggtttcactatggtggccaggctggtctcaaatacctgacctcatgatccacctgccttggcctcccaaagtgcggggattacaggcgtgagccaccgtgcccggctgccaatatgtattggtctttttcatcaatgattcagtccaaaatcattttgtcctttaactatatattttcttgtaaagctgcttctgttgtcttgaacttttcttttcaaatgtatgttgtcatttgactttttagattgttattttctggtcctcgaaataaatttaaatttcctgtaaaggaaggtgtaatattctatttgacatagccgctaaagatgtactaggtgctttataaatattgttgatttactttatcttcacagattactagttttacttagtatttggaatatgacaacattttatagagctatattcatatatatgtttatcttaactgttaaatgcaatatgattcatgtcttgttttggtcaatgatgaatgaaagtctcctgagaattaaatttactgcatcgatgcaaaaacaatcataattttagacactctaagaattttagaaattaaaggattttttttttccagtttactctgttaagattgtgtttagctatgcgtgacagcattctcactacagtggcttatccagatagtttctttttctcatagagcaagacttccagaattatgtgttccagggtcagtgcagcacctccaaaaccgtatgtcccaactttttcctccaaccccagtcatctccaacatgagactttctttttgttttgttttgttgtttttgtttttgtttttgttttgagatggagtctctgtcgccaggctggagtgcagtggcgcgatctcgactcactgcaacctctgactccctggttcaagggattctcctgcctcagcctcctgagtagctgggattacgggaacgcaccaccacgcccagctaatttttgtatttttagtagagacggggtttcaccatgttggccaggatggtctcgatctcctgacctcatgatctgcctgcctcagcctcccaaagtggtgggattacaggcgtgagccaccgtgcccagcaagactttttttcctgtggtctcaacatggctactctgcctccaggcactatgtctgtactttaaaatggaagaagggaaaatggggaaagtaaaagcatattccagctgtgtcagctcctgtttgtaaggaaaaccagtgcttttctggcagccccacacagaagagtttctacttgaacagtgcattaaccagaaatgtgtcacgtgaccattcctaacttctaaggatcttgggaggattgagtgttttaactgaataggtgtgtttctttcttcataattcaaaatgtgaaaattggtaacttagttataaaaccttgctagtctgaacagaatttggatttttttagctaagaaggaaagaaagggtatcggataggcagctggctatgctagccaagatactcttaataatgcacatttttcttctttggacataagcagttttaacttagctaaatatgatgtgattgttttcctgtcttcttagttctgtttaaatttgtttcagaaatcaaggaaataaaatggagaaaaaactctattattcatgtctatctttctgcctctgaatatttttatgttggagaaagagaaagcagtaactttcataatagcttacatagtctgacaaattctaaacatgtccgttagcatcaatatacgtggtattaggtcatcagtttttatattctgaattattaagacccaaataaacccactgagttcaagagaaagtatacactgagcaataaaaacattaccagttctagcaatgataatcaaacaagaaaacaagtaatatagtctgtttagaataacatgttttaaagatcaagtttttcttccttaccaatgttgcctttcttgtaacacttttttttccttcttgagataggctttcctatcttttgtcacaaaccccaatatttacatggccattcgtagtctattcatagcagcaccaccccatggcccaaacttgtagatattgccctccttctatggttgttctaataagaataaccactcttgtctctcataatctcagctgttttgtgccgttaaaatggaaaataatgagtattaagatactaactaggggccaggcgcggtggctcacgcctgtaatcccagcactttgggaggatgaggcgggcggatcacgaggtcagaagattgagaccatcctggctaacacggtgaaaccacgtctctactaaaaatacaaaaaattagccaggcgtggtggtgggtgcctgtggtcccagctactcgggaggctactgcactccagcctgggcgacagagcaagactccatctcaaaaaaaaaaaaaaaaaaaatactaactaggtttcagtcatatgagatgaataagtcctacaaatctgtacagcctagggcttgtagttaacaatgttttatatttaaaactttgctaagagagtaaatctttttttacctgttattatcgtacatgcaaaaataatagtaaataaggaaggtaagagaaaaattttggaggtgatgcataggtttatggcatagattctggacatgatttcacaggggtatacagtcatgcattgctcaacaacagatatacattcggagaaatgcatggttagctgattgatcttgttgtgcaaacatcatacagtgtacttacacaaacctagatggtacatcctactatacatctaggttgtatggtatagcctattgctcctaggctataaaccagtacagcatgtgactgtactgaatacttcaggcaattggaacacgatggcaagtatttgtgtatctaatcacatctaaacatagaaaagttacagaaaaatattataatcttataggaccactgtcctacatgtatacagactgtgcacatgatagtggtccattgatcaaaatgtccttatgcagcacataactgtaattatctcgaaactcatcaagctgtgttcattaaatgtgtatagctttttatgtcaataaagtggttaagaaatcaataaagtggttaaaaaatattttgactaggaaatatactatcatttctagttgataaaagatctcaacatttccaaaattgtcctacagaaaaccaggttcatcaggtgttcatacatgatcctcatgaaaaggtcaaataagctgaaaaacatgcatagacgttgcctatcctagcaatctatgatgtacatctccatagtaaggtcactgaaaagtcttttaggaatgttagtattgttagctcagtatttctcagtgatttctccatggaaaccatttgtgtagagcatcttgaggagcacagctgagagaacattatcttagttggatgtgtatgtccctctgagtcacttgatttctctacatatgcttttaccaaattaatcttttagaaatcttttctcttcgcactatgtctataatttgtgaagttgttaccaggataacatttgtgcctctcaccatgatgtacctaccagggtccaagcagccattccttctctagagcaactgtctgagggaaagaatttaacacagcattctacgaaatcattttatttataaaaatagattactgctttacatatagtaatttatatttagaatattgattaattattaaaatctgcatgagagctttaaagagtagtacataatatatagcagtttgtactcaaactgtcttctaaaaaggattcactttttgtttgtattctattgtcctattcgttgatagtgttacgtaagtaattataaaacttaaaatctggaaagagaatgtggactcagaatgccatctcttttgttatttcaaatggattagaaatgaacatacatattcattttctttcattacacatccagagaaatagaatggattttataaatatgtaaaagcaaggattttgatcactgataaaaagggaaggtttggtcactaccttatttcattccttttttcttatccttttttttttttttgtcaattatttgatgacatctctgaacatcaccttttattcatgacaagaattgggtatcatggtaaagaacactgttaatataattcagttacttcaccccctcctgaaatatagagaagctttaagactatgtgaatatttttttctggttttcttgtatttgtagaaatagcatgagctttgtttaaagtcaggcatctaaaaccttgccctgtatgttattgacaacctgcacaaattttaggatctattctattacagtttgttcaactgtaaaactaggatagcaaactctatgtcatattttcgttatcagaatttaaaaagcatgttttaagatcttagtaaataataaatctctactctgtagttgaatttgttctatattctttaagaaattccctttgatggttatgccaacctctgtattacttttcttcacactttaactttgcgctgaaatcatagtagtattttacgttatcagtcaaaataacagtcatccttaaaacaaatatgaattttagatgattaaatagatttgtatggaggttcttcttgctaatcatagcagttatccttggtgaaaaatgatagacacttgaaaaaaccaattaatcatgatggctatttttgcatcataaataaagctttcaaatttgagagggaatcaaaagggcaatggtagtatagtgtctcaaagcccctttccaattgatggtacaaatttaaaaagagagagagagagagaaacatgtttcactgtaattgttttctaagagcttccaaaaaagcgtattttcttaatagattcaaatttttcagttggattgaaagggaagtcttggagtgtagtgaggagggcaccttctgttgagaggtgttcagacgacagagtgtgcccaaggccaaagatgagatggttttgcgaaagtcagtggccacaaacaggtgtgtttgacccctgagagatatgcaggaagtctaccccactttaattcttccaaatattctttaccttaattcccaagtacttgataaaggagcaatggggagaaaatatgcacactattatggaaaagttttgacctacactttggagagttttagattaagagcattctagaaatcagtcccaaatgcctagggtttacttacttaaagataatatcatagtttgggtgactgggaagcataccctgagattgaggtgagcatgcagtatgtctatttaggagtgttcttggggtcaacgtgtaggggcagagggagaagttgagctctgacgcagtcttagtaagggcctcagctgaccgttcagggagttcttaagctggaatgacccttcagaagtgctaggaaacgaagaaaggggactggatctttataaccccgtgtcaagtcatgcactggatgtgggctactccaggaaggcaacgaactttagcaagatgattctctttagccacgggaatttccataagggggctgctatggtctgaatgtttttgtccctccaaaatgtgtatgttgaaacctaacactcaaggtgatggtattagaaggtgggggtttgggggggtgattaggtcatgcgggctctgccttcagaaacaggatcagtgcccttataaaagcggctccagaaagcttccttgccctcccaccatgtaaggacacaccgaagatgccatttaacaggagtgggccctcaccagacaatgaatctgctgatgtcttgatcttggaattcccagcctccagaactataagcaataaattctgttgtttataaattacccagtctaaggtatttagctatagcggcccagactaagacaagggctgacagctgaaggctgtctaccagcagcactcctagcagctggggaactaagtccttcatttccaaaggggaatctaggcagcatatttacagcttttcactacagataagctcattatttcaaatagggactagcaggaaaaaattaaattgcccaaaatttagtgggatgctgaaatagattgtggtgtgtaaattggagtatagtgaggagagcaccttcaaaccagtatgtactacatgatattgtttttgttgcaatatttattatatacccaaacacacatatattacttttagaaacacacaccacatatatatctatgaatattttatatacacatagggaaggattgttgatgttatttatgctattttaaagatcgatgttttcatataattatgtattggttatatattatttcttgatataaggtaaaaaaaaaaagcaaaacaaactttaagtgatcactatgaaaagaatcccaatgctgcacatttaggtttatccaactcttcccattaaaatattaaatagtagaaataattgtgaataagaaagagcagattttgaaaaatggaaagaaatgcttaaagacatagcattgttgcccaaccatcattatttaaacatacagtgtttggctttgaccaaattgccttcaaacacttccttttggcccaaaatgttaggtcatatatactaccataaaattcatgatgcttaccatgcattaatttctagtatataccaggcattgtgctatgcatatcatattcaatatttctaatcctctcaaaagtggtacaagctaactggcgtttttcttgttttgaaagggagaaactcagagaggttaagtgacttgcccaaggcaatgccattgataagtgccagattctatcacaggtttattggcaacaaaccatatgtgcgcgtgcatgcgcgtgtgtgtgtgtgtgtgtgtgtgtgtacacatacacgaataacatatatggtataaatacgtggaaacataataaactgcattgagctgcgtttataattagtatttaggacatgtttggcaaataaaaacagtggagattgaaatggatttgcttaggaaaaatgatacattaaaataggctttattatgagtcttcaactattctgtgaaaatagatacccagggaagaaataatagagaatatgaatcttgagcaggcaactgagaacttgtcgaagagccaagataaaaatgtcagagaggagaatattttggcagctcagatgagcccccagagggtgggaggcaatgatctcaccgcagtctcgtatctgaaccccaggtttttgcatctccataaagtaatttcttacacccctcaataatgatcgggcttactctcaatctctcgctctctctctgtgtctctctcacgcacacaaacatgcagaacatttcttgcacatgcataactcataagacgattatgtaaataccagcctttttatttcataactaaattacaaggcctggttattgtttggactgtgaaaaaataattatgtgaataggtgcctcaagatgaaagacaaggcaagattgtgaaattattcatatgatagtaatagtatgcaaaaaataacacaatctttaaagatctttaacgacctagttataaaaccatgctttataacaaatataaccatgaggaaataaaaagaaaaatgtaataatatactccaagaataaagtcaaatgtattgttgaatgtaaggagttggttacacttccttatagtggaggttattttaaaatttgtggcttacgtggtgttatgaattgccctagatcaacactattatgcaaggccaactattaggttatttttggtagataaccacagcaaaactttagtataataggtaaaggttagctacactcccataccctcactctcaggtgttgtcatactccgtataaaaggttcaatcaagggagacatgagaatattccagaatctagaggcaggatgcagttaaccttagagaaggcatcagacaactagaatcttcggattcaatgtggaaacaaagcatagtttaggcattaaatcttgggcaccattccaaagaatacaggttccataacttactatatttttatacctagcaagctagagatgaggaattgctctcaaatattttaaccaaagcatgtatcttaagtaacactaatctcataagtgaaaactcatttctaatattcattttgctcattagcaaggcctctagtgttgactgtgataaaaaatagttcaaatgctggtagaacccaccccaggagactggcctttctgattaaattctaactctatccccacgtgaattcctgacttaagtaactgagttcctgcacatcagaatataagtatattatagatataaaaacatatgtaattaataaatattttaagtgagacacttctttcatctttatggcttaactatatcagacatttgattatttttagcggtctaactacaaaacaaaacacaaagcccacaactaaaaatttctttgtatatattgcaaagaggcaaccatttggtgtcaattcaatcatgagtgaaatgctattatacgagtacatctccctggcttgtatgggggtaatagggcatggaatttacagattcacaataactgagatattcacaataacaaagatatcaatatgtagcttttcccataactttgtgtaatgaaatcctcagtttgtgctgtgtaaaaagcttattgtttacttctcatgaaaatcatcttagtttttatctttatttaatagtctgtaatttgggggtaatacattcgttttgttgatactatgtgaagtggcaagcagaaaattctaacaggaatagataagcaagtatcctataaatcagagtcagtgtctctctctctctcttttaatgagtcagtctgtctctctctctttttccctgcctggctatctatctgtatttttcagttttgctttgcaaataagagaattgtgtgttgtaaaccaaccaacttaccattaattttctctgaattcaaaagcaattacaagcggactcttgagtttgtgctgcctggttgtctgcatataggccagatgtctagaataggatctttatttactatttttaccctcctaatttcatggtaactccaaggtagatgatatttgtaatcgtacactacttgtcagaaatctttctaataacactgctattttataaaaataaacattaattcagtataaaattttattttaaattgttaattcaagcaaatcagtgaggtaacttttacactgccgagcgtacgtgtgtgtggattagtacagccatgccatagacttcacttgtaatcttttctttatattttttatacacctgaaatgttcatcattgtgctgtagaaaacaatctcattgtgtttttaaaagctagagtgggtattgagaaggggaagaggatcatagaaaaagttggttaacatgctacttaacacttcaaatctttactcgatgtcatcatcagcaacattttaaatttatgcttctactagtttgcagttcttttcctttgattattcttatgatacaagcctttccacacaaaatttatgtacaggaattgtgtagaatttttctttggaaaatatggtgatttattacaatttgggcaacatcatcattttaaaaattcagaatttgatttttctcagaatcatcagaaagaataaagcatatatatggttcatgtcaggagaattagaacatgagaattaatatatctctgatcttttaaaatattttcatgtttgtgaatcagcagatttttcctagtttgagatttaaaaaatctagatataattaaaatctcactgatgtttcaccatcagatgattttatatttgtattttcttccacttcataacttgtatagagaagaatagaagaaagaaaaagggaggattgataatctttctctctcagttcttatagcacttcattttttaaacttattacttccttctgcctgctttgtttgtctacatgtttgtatttcatgatttcttagaaatccatctactgccattctgaaggtcatttacctgaaaatgatagaaagcagcatatattcaaacaactgcagagtaattgtctatatcagttatcattgttcattacttttctgttttaggattgaggggctgcctcgccacctccctcacacccccagcatattatcacaaagcctactgattcattcacatccctgggctgaatttgccacccactgtgtgttcctgttgttttgtgtatggaagtgaaaagatttaatttgatgttgttgaaaagacacagaggctaactttcaattttcatatgtagttcttccctctccctctgcaccacctcctttacttgttgagaaaattgccctctccatggtaacaatagaagaagctttcagattttagtagtagttgttgcagagaaaagaattcaaaaagtagatgaagtttaaaaatgaaaaagagagaggaagacagctgggaagaaggcttaatgtttatgagtgggtgtggaggggaagaactaagttgaatgaacaaagctgagctaaggggaagatggtttttctgcatcccagaaggcaataccctagcctttcctgcagccttcactccccaaaagataagagctttatctgaaattcttataggattcattcctgaagagcagcttgtcaccaaacagaaacactgtgatttcctcagggagtcacagtttattattatttttttaatgtaacgcttttgtgaactccagtttccacctcaattcaaatggtcttttggttacagggtgaaagagacccaacaatacacctttcccacttccggaggcctttggttaaaccatgtctgccacaaggacacaggagcctggtatgactggttgttttttgtttgcttttttgcctcctgtgctttctagattgtgagatactgtaactcttgtcgatgacacatagtaccgaacccacccgaagaagtatgtcagtatgtcacattgtgacaaacagcttctcatgctaagtaaatgcagaaccattgtgaaaggtttaataatgcccactcctcccccgccaaagatgtccatatcctaatcccaggaacctgtgaatatgttaccttacatggcaaaaggctttgtattaacagatgtggttaagttaaaaatcttgacacggagagatagcctgggttaccccagtgcgcccaatgtaatcacaagagtcctcctaagagagaaggaggtgatgatacaagcagagtaaaagagagattggaagatgctacactactggcattgaagatgaaggacagggccaagagccaagaaatgcaggcaggctctaaaagctggaaaaggcatggaaaagaatcctcccctacatcccttagagggaatgcaagctctgccaacacattgtttctagcttgtgagacccattttttggactttggacctccaaaattgtaagataataaatttgggttgttttaagccattaagtctgtaatcatttgttacaacagccacaggcagctaatacagccatgaacatttagtaatgactaactttgcacaattttaatacaagcttcttattaaggtttattttttcttaattacaaggaataaaagtggggtctgggggcaatgtcatggtccactccgttttagccatatgaatttgtatttccagcattagaacaaaaggtgacaaatctgaatgtatttgtgtgaaataataataaagcagaacaaaaagggaaaagtgtccagctggaaatgaagttagagaaagatgaggagaagcaagccaattgtgtagttttcccttctgctttttaaaatcatgatttgtttaacccactgaattctattttagaaacaggactgcaaggaagtgttgatggatttggtggcatgagaaccagagtcacagaggcaggaaagtaaggaataagtgttagaataggaagcagagttgcttgggaagagaccttatgacatgtggacagggctagacttaggagtcagaaagacctgagttcaaatgctatcctttagtatagtttgaagtcaggtagcgtgatgcctccagctttgttcttttggcttaggattgacttggcgatgcgggctcttttttggttccatatgaactttaaagtagttttttccaattctgtgaagaaagtcattggtagcttgatggggatggcattgaatctgtaaattaccttgggcagtatggccatttacacgatattgattcttcctacccatgagcacggaatgttcttccatttgtttgtgtcctcttttatttccttgagcagtggtttgtagttctccttgaagaggtccttcacatcgcttgtaagttggattcctaggtattttattctctttgaagcaattgtgaatgggagttcactcatgatttggctctctgtttgtctgtcgttggtgtataagaatgcttgtgatttttgtacattgattttgtatcctgagactttgctgaagttgcttatcagcttaaggagattttgggctgagacaatggggttttctagatatacaatcatgtcgtctgcaaacagggacaatttgacttcctcttctcctaattgaataccctttatttccttctcctgcctgattgccctggccagaacttccaacactatgttgaataggagtggtgagagagggcatccctgtcttgtgccagttttcaaagggaatgcttctatagtacaaggctacagtaaccaaaacagcatggtactggtaccaaaacagacatatagatcaatggaacagaacagagccctcagaagtaacgccgcatatctaccactatctgatctttgacaaacctgagaaaaacaagcaatggggaaaggattccctatttaataaatggtgctgggaaaactggctagccatatgtagaaagctgaaactggatcccttccttacaccttatacaaaaatcaattcaagatggattaaagacttaaacgttagacctaaaaccataaaaaccctagaagaaaacctaggcattaccattcaggacataggcatgggcaaggacttcatgtctaaaacaccaaaagcaagggcaacaaaagccaaaattgacaaatgggatctaactaaactaaagagcttctgcacagcaaaagaaactaccatcagagtgaacaggcaacctacaacatgggagaaaattttcgcaacctgcttatctgacaaagagctaatatccagaatctacaatgaactccaacaaatttacaagaaaaaaacaaacaaccccatccaaaagtgggcgaaggacatgaacagacacttctcaaaagaagacatttatgcagccaaaagacacatgaaaaaatgctcaccatcactggccatcagagaaatgcaaatcaaaaccacaatgagataccatctcacaccagttagaatggcaatcattaaaaagtcaggaaacaacaggtgctggagaggatgtggagaaataggaacactcttacactgttggtgggactgtaaactagttcaaccattgtggaagtcagtgtggcgattcctcagggatctagaactagaaataccatttgacccagccatcccattactgggtatatacccaaaggactataaatcatgctgctataaagacacatgcacatgtatgtttattgaggcactatttacaatagcaaagacttggaaccaacccaaatgtccaacaatgatagactggattaagaaaatgtggcacatatacaccatggaatactatgcagccataaaaaaggatgagttcatgtcctttgtagggacatggatgaaattggaaatcatcattctcagtaaactattgcaagaacaaaaaaccaaacaccgcatattctcattcataggtgggaattgaacaatgagaacacatggacacaggaaggggaacatcacactctggggactgttgtggggtggggggaggggggagggatggcattgggagatatacctaatgctagatgacgggttagtgggtgcagcgtgccagcatggcacatgtatacatatgtaactaacctgcacattgtgcacatgtaccctaaaacttaaagtataataataataataataataaaatctcaaaataattaaaaaaagaaacaaacaaatgctatcctgatcctaactggctggctgtctttggggaagttggtaatcttttctgtgcttatttcctcatgtgtaaaaaaatgaatatagtacccagctaggtagagttgttgttgggattaaatgatgactataaagcatctagcccagcttcggctacattatagctgcttacgaaattgtagttacgatgtaaaagagaaaaacactggaaaaggaggatatgggccattttattccaccttcaccaccttttagcttggtgaccttgggcaaattatgcttcattccgtgcttcattttccttgtctataaaagggtgtaagtacagaaccattgaggggtggtcattattaacctacctcaaatggtgtctgtaagttaatatatattgtgcttttcctatgtacaatatctagcacataattacaaatcaaatccatcccatgtgcaatatctagcacataggaaaagcacaataactagttattactcttgttgtagtaattgctacgctgtaggagtttgaattgtaaggcagtggagagtcactgacctttacgagaaagtgtagcagaacatttgagtagatagtaatggggaatattacataaatggatagatattaggggcagatattactattaaaatattacagcatggatatttattaaggccaaactggttaattagttgcatctctcaggttcctaatgttgcttaattttttaacctcccattttgtgctgccctttgtacgaatatttaatgctcccaacacctcttcagtagcacatgtactgtgagtttgttttgttattacttgtgtgtattagcattcctttgtgaaccaaaagcatggaattagctgttgcctctaggctacctagttttgtagtttggattgaagccttcacctcagtaacacctattctgtctactatcttacagaaaacttgtaaaattaagacagatcattaatatagcagaaagagacaaagggcagagaacattgagatactggatattggaaccacccaatagtgttgatttatttatgattatcagtttttgtctctgcctagcctcatgccactaaagtctctgaggcaacaaagaataagcaattttgctcaccttatacaaataaaacacagaaaaaggaatcactagagaaatggtactgcagcctttctgcagggattactgcttatttttaaattacttaaaaggtattgaaattattgttcataatgagaaacctgcctaataaaacagaaaattaaacttaacacttccctataatgtaaacagctcggttaggaacacaacattacagaaaccacttaagaattgattgtacttgttcttggagcagaactagaagctcaccgtttagaagctgtgcacatttccctatcaaacagtacataaagtttccatattcctcagaatcggcttcatttgtgccatgtgtttgcttggaactatgccacagaaagcagttctccccctcaagctgggctcctttcatgccgcagtgcaagtgtgtgatatactggcaccatgtgctaatgtagacccatttttatatgataagaattagtacggcctagggaatagacaagtatgtctaaaatcctccccatagaatatgtcccttcctttaaaagctgtcatactgtaagttccagctgagttaaaggccactgtgctcctatagggaaatatattctattgtaatttttacgttctccaataacagtctgttctttgtttactgaagagagctttcatgtcataaaatggtgttttttgacagagaagcagaatcattgttttattatagaaatttgctcttacaacagcaaaaataaatagctcatctcttaagctcctgatcaatgtctaacacctcctacccccagcaacacttcactgcaagtatattaacactctataatagcaattccactcacctaccaagaaatgatcttcacaaatgatttacagctaaaccagagcttaaacacatagcacccaatcaagggcagatttttatctttttcccagtcatataagttctgagaagaaatagattaatgttgatctcccagacaactgctgagaaaatgtacaaaggatgttgtttattttgaagaatgagacctagttgttaagcactttttccccttatatgtacgtccaaaggtaaccattacaccattttgatgcaaatttaggatatatatttattcatacctctcttctccattcggatgttgtctgtgtgagtgctcacagacacatgcacacatacacacatgcactcctgtttcacacttatttgtaaaactcacaaggatttccaagccattaatatagcattgtttaaggtgaacacatggttgttcaccatccatatgtatcttcactttgtagcactcagaatttggcaaaatcagaaggctgaaacctcatggattaaatatattctatataacatatgtcttaattgctgttactgtaaagaaacctggactagccatatttgactaatttctacctaaggtatttgaattcttataaatagattcattgctttaatcacacaagagtggtttatatgaatgtaattatctccactttatagctgaataaactgagcctgattctatccctatatgggaaacatgaattgaacagctgtgccaattattttgataattcaaatttcacatctaccatgtgaagacagcagaagagggttagggggcttgaattattctgattaactgtgttcatgagtgtaatcgcctctagataatcactcatttcttcacttcacttcccatctacaggtagtatcagcgaatggtaacatctcttgctttgcctcagtttattgatggctgccgttagaaataaaaagcatggttttgtttcagtacttaaatgaataatatcttcaaaatgtttttaaaacgtgaaaaggttgaatgcatttttaacaaatgttttgttagctttgacttttatttttgaacagatgagcacaataccccagtactcctttcctagaaataggagtactacctgaagacttatttcccaaagaaaaatatcaggtctagtgcagcaatacgtattaagggcattgaaaagttatattcacaaaatgtgacatcataacatatgttaatacttcttatcactgataataatccttgaagttgtatttccagagagatctcaatttcttctcacactctgaaagtctctgtttatcctttagagtaggaatgtaagaatttaacaaaacattctgaatgtttaccttttttctaaactgaaactacaatccctttttacccctatatagtaaaatataatattacaagtagaatcagcaaatttgtttaataattctttgggacagtttttacaagcaatggggttgaatttatgttccttgtgtgcagtggagttattatattcttcttaaaaagatgcatgaaggtaaattagaaatgttttacatgttttcatgacaggacatttaatcaaagaggagatacaagaggcttttcttgggttactgcaatttaattttccatttctttcttggaagggacattggatgcagttgtacgaggttaatatttctaacatgccacttttattgtggcattcttctgctctcaaacctctgatgatttcccatggccttcaacatgatgtccttatttgggcatctagtgttctgagccctcacattctggccccagcttcccttctcaacttgatcacagccatcgtaattctgctaactaattacacagctgcccttcccactctttctcaaccactctgctgtattctgacttctacactttagttttaaagctactccttgtcctgaaattccttctcccattaggtcattattaattgagttcatcctctaagttacagttcatgttgctgttcctctatggcaccttccctgaacctggtcccatataaaatcccatctctcagaatcccattagggtaggatatgtggtctgtagactattacgtttgtcatttacatattgtcttctattattgggtaactgcgtgtgcgagcatgcatgggctggcctgaaggtcacctccccaactgcattgaaagttcatcacaagttcaattatttcactagagagtctctttcatgtcatccatgaggcacattccctactgtgatgtgttatgcatacaattatttcaataaatattttctagctctttgattgaccaaagcttaattacctgtcaactctagcctcttgtatctggaatttctacagtctttggatagtatctttaggatgcaaaattaggaggagtatgtaccaggcaaactattacaaataatgccctcaaatagttacatttcactattcatgtcttgtaatttatcttctgctttggtattttagtacacttatgattcaatttgctgtatagattcctctgaatagggacaagagaattcgtcttgataagtggaagttcgaaggattccaaaatgatgttattcaaggtagaacaagaaattaatactgaaaaaattgaggagtaataatccccaaatatgtacatgcgtatctcgttttattgggtttcactttattgcactttgcagatatttcactttttgtaaattgaaagtttgtggcaaggctgcattgagcaagtccgtcgggcacaatttttccaacagcatgtgctcgctttacgtctctgtgtcacgttttggtaatttgctcaatatttcaaacattattattattattatatttgttatgatctgtgatcagtgacctttgatgttactattgtaattgttttgagatgtcatgaactgcactcatatgagatggcaaactttgtggggtgcagtggctcacacctgtaatcctaacactttgggaggccaaggcaggaggatcgtgttagcccagaagtttgagaccagtctgggaaacaaagtgagaccctgtctttaaaatatatatgtagaaaaattaactgggcatggtggcacatggctgtaaggagccctgccagctgcatgggaggctgacacaggaggatcacttgagcccaggaggtcaaggcggcagtaagccatgttcactccagtgccctccagccagaatgacagagcaagaccctgtgtggaaaaaaaaaaaaagacaaacattttttcaactttgattttagattcagggagtacatgtgtaggtttattaccttgatatattacatgatgccgaggtttggagtacaaatgatactgtcacccaggtactgagcatagtaaccgatagttagtttttcaacccttgtttccctccctccccactctagtagtcctccgtttctattgttgccatcattatgtccatgacaacgcactgtttagctccacatgagaacacgtggtatttggtattgtgtttctgcattaattcacttagaataatggcctccagctgcatccatgttgctgcaaaggacatgattttgttcttttttatggctgcatagtattccatggtgtatatgcaccgtattttctttctccagtctgccactgatgggcacctaggctgacttcatacctttgctattgtgaatagtgctgaaatgaggatgagaatacatgtggttttttagtaaagcaatttgttttatttgggctatatgcccagtaatgggatcactaggttgaacgatagttgtgttttaagtcctttgagaaatcttcaaactgtttcactgtggctgaactaatttgcattcccagcaacagtgtatcagagttccctcttctctacagcgtcagcagcatctgtcatttttttgactttttaataatagccagtatgaatggtgtgagacggtatctcgttgtggttttgatttgcatttctctgatgttgagtgatgtggagcattttttcatgtttgttggccacttgtatgtcttcttttgagtagtgtctgtttatgtcttttgcccattttttttgatggggttatttgtttttgacttgttgaattgtttaagttccctatagattctgaatattagacctttgtcagatgcatagtttgcaaatatattctcttattctgtagactgtctgtttactctgttgataaattctttcactgtgaagagctctttagtttaattaagttccacttgtcaatttttggttttgttataattgcttttgaggacttagttataaattctttcccaagtctgatgtccagagtggtgtttcctaggctttcttataggattcttataatttgagatctaatgtttaaacctttattccatcttgagttaatttttgtatatggtgtaaggagggggtccagttgcattcttctgcatatggctaaccagccatcccagcatcatgtcttaaatacagagtccttttcccattacttattttcataagatggcaaacttaatcaatcaatgttttgtgtgttctggctactccactgatcagccattccctcatctctcttcctctccttgggcctccctattccctgagacacaacaatattgaaattatgccagtcagtaaccctacaatgtcctctaagtgttcatgggaaaaaaaagagtcacatgtttgtcactttaaatcaaaagtcagaaatgattaagattggtgaggaaggcatgtcaaaagccaagacaggctgaaagccagacctcttgtgccagttggccaagttgtgaatgcaaaggaaacgttcttgaagaaaattaaaagtgctactctgttgaacacaggaataagaaagtggaacggccttatttttaatatggagaatgtcttagtggtctggatagaggatcaaaacagccacaccattatcttaagcaaaaggctaatctaaagcaaaggactaattctctgcaattctgtgaatgccgagagaggtgaggaagctgcagcagaaaagttggaagctagcagaagtatgttcatgagccttaatgaataagccctctctataacataaaagtgcaaggcagagcaacaagtgctgatggagaagctgcagcaaactatccagaagatcaaactaacatctaagttaataaaggtggcaatactaaacaacacattttcaatatagacgaaacagccttctattggaaaaggatgccatctaggactttcatagctagagagaagtcaatgcctggcttcaaaagttcaaaggacaggctgactgtcttgtgaggggctaatgcaactggtgactttcagttgaagccagtgctcgtttaccattccaaaaatcctagggcccttcaggttatgctagatctagtctgcctatgctctgtaaatcaaacaacaaagactagatgactgcacatctctttacagcatggtttgatgaacattttgagccctctgttgagacctacttctcaaaaaaatgtgtctttcaaaatattactgctctttgacaatgtccctggtcacccaagagccctgaggaatatgtccaaagagaatgattttattttcatacctgctaacacaacatccattctgcagtccttggatcaagaagtcacttcaactttcaagtcttattacttaaatcatacatttcataaaggtatagctgctatattgtggtgagtccactgatggatctggataaagtaaactgaaaacggaaagtcctcaccattccagatgccatgaagaaaattcatgattgaggggaggaggtcaaaatatcaacattatcaggagtttggaagtagttaattccaacactcatcaatgactttgagggtccaagacttcagtagaagaagtcactgcagatgtggtagaaatagcatgagaaccagaatgagaagtggagtcagaaggtgtgactgaatagctgtaatctcaaggtaaaacttcagcggatccagagttgctgcttatggatgagcaaagattgtggtttcatgagatgcactctactcttggtgatgatgctgtgaacattgttgaaatgacaacaaaggatttagaatattccataaacttagttgataaattagcatcagggtttgagaagattgactcaaattttgaaagaagttctactgagtaaaatgctatcaaacagcatcacatgctacaaagaaatcattggctataaaggagagccaatcgatgcagcaaacttcgttgttgtcttattttaagaaattgctacagccatcccgaccttcagcaaccgccaccctgatcaatcagcagccatcctcactgaggcaagagcctgtaccagcaaaaagattatgactccctgcaggctcagatgattgttaccattttttttaggagtaatgtattttcaaattaaggtatgtacattttttagatacaatgctattgcacacttgacagatgatagtagagtgtaaacataacatttaatgcactggggaaccaaaaatattcgtgtgcctcattttattgtgatatttactttattgcagcagtctggaaccaaacacacaatattccaaggcagtcctatatattgtttcatgtctctctttcttctaaaatgtgtgtaggagaaaaaattatatcacttatgttactgggccataatatcaaaagcctgcgaatctgatgcacatgataaaaactggtcttaaacctgtcttgattatcctttgttaatatgccaaatttatagaacaatagagtttcaagaaatgtgaacaatgtagaataactaaaagatctaacgttgaatagctaaaattatcaacgccctttatatcactttagaaatgcgtttgcaaatcattatcaacaaattgtagcataaaattctttttttttcttgactttgaaattgtatttcaagatccgcaatttacaccacattatttacttactggcttgtgaaagtgaaaggcattttcatttttggatgttaagggttttagtaaatgacaagtaaatcaatcctttaagttccgtgtggtataatagcttggaaaggaccatcttaatctttttttcaacacagggagataatttattttaaaaataacacactaatagtagattaatattattaccatttcaaagaagtcaccaaatttggtaggcttaagaggttttttttttttttttgagattactatgctctttttttattttatttattttatatttatttatttattttttagttttttaattttactttaagttctgggatacatgtgcagaacgtgcaggtttgttacctaggtatacatgtatcatggtggtttgctatactcatcaacccaacatccaggttttaagcccccaatgcattaggtatttgtcctaatgctctctgtccccttgcccctcaccccttgacaggccccggtgtgtgatgttcccctccctgtgtccatgtgttctcattgttcaattcccacttacgagtgagaacatgcagtgctaggcttaagagtttttttaactccccaaaatatcaacaaattgaaacattactacaaagaaatagagaaataaatttcactgactgtcttattgttttttaagtttgaatagctaataatgatttcttaaacagctatcatattttttatttttaaagctagccaaatgatcagtgatttttataatactgataaatactgcttagaaaaggaacatgtgttctagcaatttccacacatttctgattctaattacttgtttctttttgttttatttttatatttttaagttttgtgagtacctagcaggtgtatatatttatttggtacttgagatgttttgatacaggcatgcaatgtgtagtaagcacatcatgtaaaatggggtattcaacccctcaagcatttattctttatgttccaaacaatccaattatactcttttaattaatgtaaaatgtacaattaaatcattattggttatagtccccctgttgtgctatcaaatagtaggtcttactcattctttctaactaattttttgtacccagtaactatacctacaccacccccacctccccacgacccttcccatcctcaggtaaccatccttctactctctatgtccatgagttcaattgttttgaattttaaatcccacaaataagtgagaacatgcaatgtttgtctttctgtgtctgatttatttcacctagcatactgacctccatttccaacaatgttgttgcagatgacagaatctcattcttttttgtggctgagtagtattccattgtgcataggtaccacatgttctttgtccattcatctactgatggacacttaggttgcttccaaatcttggctattgtgaatagcgctgcaataaacatgggagtgcagatatctcttcaatatactgatttattttcttttgggtatatacccagcagcgggaatgctatattatatggtagctctatttttagttttttgaggaacctccaaacggttctccatagtggttgtgctaatttacatttccaccaacagtatacaagggttcctttttcttcacatacttgtcaacattggttattgcctgtcttttggatataagccattttaacgggagtgaggtaatatgtcattgtaattttgattttcatttctctggttatcaatgattcagtgatgttgagcaccttttcatatgcttgtttgccatttgtatgtattcttgatctgccacaagtctctaattacttgtttcttgtaccactgtttcccttcattgtagtcagtgatttggtcaatcaacactttttacgtatgggtatctgttaactgtatttctaggaatggaccaagaattgagaaatttatcccaaccagaaagaacaaaatctatggaggcacaggattactgaaagctttgctcctatagcctcagtttttttctgcaagttcgctgcttcccagttgtccttgtgataaaattcaaaacctcaaactgatttttaaaaagccaactatatactgcttctactatgtctacctaaacttatttgccattatttgtaaagaattccaggctctaaccagcccatttgaggctttattttacgttcatgcctttgttcatgtctgtctttcccttataatgctcttctcattctctagccaaatctgccaaagttcagctgtagtgccatacttgatatgaagtctttgctgagaattcccatatgtggtcatttccttcactgatttgtttcaatagttgttgccattattattattttttttatactgttgctggatactttcgcagatccaatctctaacctgttgttctaccctaggaggttgaccaatatggcagtagcattgggcttgcttgtctattggcttggtccttgtgttgggaggcatcagcagatcaatggatgagaggagagtgagtcgagggatggctaggttcctttactcacagccccagctcctgtcaagaggtcttgtccctgcagccacttctcagattctactaactataccctccccttagcctttcaggccttgaggaggaaagcctcctcatcccactttgaatgaactatttattgcaagaaccatgactgattcagaatataatctgtccttgaatgaaatagttaatttccccttttgtattctcgtttcatatccctgtccctttatccattcctatattatatcatactatcatatagctaccttatattatactatgacatgagtaccttgtaagtatatcatgctatattatagttcttaagtgtgtgggctttggggccaacttacctatgttagaagttctgccacttattaccatgtgatcctagacaaattgtttaacttctttttcattcattttctttactagtaaaataggggcaatattagtacccacctcacagagtaatatgataattacattgactgatagtttttatttaaaacttttattgttcttactatgaaatgggaaatgttctaaacaccttacaaatattaactctattaattctcataatgaatctgagaggtagagactcagtatctccatttcacagtgctggaaatgatacagacagcatttaagtaacatactgaaaatagtaaaccgaataggtggcagccagtatgcaaattgggaaagcctgactccagagttcattcttttaactagtatgctgtgatagactcttttggcatatggtatgcactcaataaacaactattgttgttgtcgttagcattacttcccattgtattattacacaaaaaataattgtttatgagtatttgtttgctagattataagttccttgaaaaaagaagacaagttttatttgtctatgtgtactagctgagtgcttggcaaatagttgcagtttagtaaatgtttctaaaacaaattattagttgtttcttatgtatttcccaagtctatcctagccttggaaacagctaacacttagctaaacctagaaatgtcatttgagatttcagcagccatcattgttgctgaagccacaggttctcctttttatctccaatttcttcctcagatgattcaccactttctttgtcgtttccctacttcatttttcctatagtgacttttgttctccaataaccattgatagtgatgacagtcccaccttggaaccacttctaactgtcctgttcagcttttcctgaggccagatttcccccaaaatacattttttagcttcataactgctccttccagaaatttgaaacgcattctcaggaattaagcaagaggcatttgattgacgtcatttaatttgtgtttaaatgtgttcttcccatcaacgattaaccagtgcttcagccaagatacataacttttattctccactaaccttagggttgaggtcacaatcaggtacgtaatctgtagagcccagtgaaaaatgaaaacgcagggcccttggttaaaaaaaaattaagaatttcaagatggcaacagtagagcatgaaaccaagtatgaatcccttctaatgcagatccttgtgtaactaactgcacaagttatacgttcaagaagctggtcctggttgaggtctttgtctacctagggcacttctcactcagagaggtggaataatcttaactttctgtcttccgtcatctgaaaacttgccccaaagttccttttgccatctcttgcagcaaacctagtggttgttatctgttaaggattcctggtggcttgctttagtttcctacagttcttgagctgcatgtgttgaatggaactccaccattaccatgtaacacatctgaatactcttattttcctccagttaaattctgcgctccttggaaataatggtcatgcaccctaccttagtgatttctaaatagaggtagtatgtaaaaatacatatttacttgaattgcatcttaagaggccagcccatgggaggcatgaagaaacctatgttactaattaatattcaataattgacagttacacattcaggtagtagtgtcatggaaccatcacgttacatggaactgaagagctgatgagaggtttagggtctaggaggacaaaagtgagtgtattagtcagggcctgaggttatatgtacccagacaggataaaatgggacaatattttattagtggaaatatctatgtgaaagaaaagaaggaggaagccaaggaaggtgcaagagatgttagatcaagatgcaattctgactctgcaaggaagagagagggagagaaggctaggcagaagcatcccagtgtgcggtctagtggaaggaaattttggcaaagctgttgggaagtcattgaggcagagccaggcaaagaagtcccatgtctcccaaggaaggctctctgccttagtattcccaccacacccaatcattgggtgaggagaagtctgtgagaagcttggctttggtgcagtgcaatcatggatttcaaaatgcagtaacaggagtcctcagtcagttaagacccaataatagaaggcctgcatattctcatggtggccacttgggtatgaggagcagtggtgtttaaaactgttttgtataatttaaataaagaaaagctgaggactacttaagcttgattccttcagaagacagtctttggcctttatatttcatgtgatatctttgccatatgctctgataactctccatgtttcccctaccataatacctcaggttgttgcaattgcttttttattgcctgtcatcactactcgtttgttttctctttgagaacaggaattattttctccttcactgctacagcccctgcacctagctcaatgagtgacacaacagaagcacttaaaaaattgctataactcaaatttgggggatattctacaaaatacctggcctctgttggtcaaaactgtaagtgttataaagttcaaagaaaggcaaataactatttcaacttaaaaaagactaaggagatacgacaactaaaagcaatgcgtgagtctggaccagaccaggaaataaaaatatagctataaagttcattaatggggtaattgtcatactctgaatatagagtatggataagattatggtactaaagccacgctaaatttcctgactttgaaactgagctgaggttatttaagagaatgtctttgctattaagaaataaaacctaaagtatttaagggtaaaggggcatgatatctgcaaattattctcaaatgattcagaaaaaaaatatatatatataaaacattacatatacagttatatatctatacacacagagagaatgataaaatgataaataattaaaaataatgtggcaaaatgttaacaaatggtgaatccgggcaagggttacctgggagttctttatcttgcaaatattctgcaagcttgaaattatataaaaataaaatgcatcttataaagtatttattcagtgaataaagaacaaaaaaggctaactgcagttggaagatatttatgaagttggttatgaagattcttaagaagttaccgatggaggtgctagtagaacattcaaaaaagaagtagggaaggttgaccaagtaggaaaatatcaatatccaagccagtataaaatggaaatgagaagtgaggaagtaagtggaagacaatgaggatggttttcgatttggccactctatttggagaggcagccgaatgcaagaatagaagccagaagaagatgctcagtgagatggttgaaagctagatagattacagcatcctcaccagtaaaaccctttcggtaactagaaaggctacaatttagtaccttcctgacttctatgcttattttcttcaatacataaaatggttccgtaaactcttttaccttctgaattctttatattaattttttgaagttgtaaataaaatagcatcagttctacattgttacatttcagcttaattcatattcatttactgaaaatgggaacatttgaaaaatcatcatgggcatttatgctatgtagattgttgatttttatagaaaaatataaaaatatgaccagtttgattttcaaagtcttttcttagacatgtaaatactaagcattcaactcaacatatagagtttttatttgagtattatttaggtggaattctattttaatgaatacaataaaaaattgtaattttgtctaaaagcctaaaatgccctagttataatatgtatgatttcactgtttaacttcctatttcatagggttgctatttataaccacttcactcaactctggggggacttagtgagattaaagacttctgattcactttgtatttgaagaattttttttcctccatctttgctcagctagtggaatccatgatgaattctcatctccaaggggtaagcagtttttagtaaagcccagtagctgacttatgactccttagaaatagcattgattccttccttctcctgtgttttgtttcctctagaatgatagaatccatgtagacacgatccattatcatgcttaggtactggtaagcatgtaatgattttagttttgttcgctttaagttatttgtgtcacaaatatctgggatcatatcagagaaataaataagcacaattagcattctacttgtttgttatgactaaagctaggttgaggaaacagaaaaggaccagaggtcatatgaggatgaagataatactaggaacagcatgtttgggagagtaacatctggtaggggtagcagattgggggcagagaacagaattttatagatggatattttggaggcaagtagtttgagtaatgattagatctaaggtgttttctcatctgtgggtggctcgaaggaatagaggtgaaggtcagtttatttgagaagttctggaattataaaactaagttgaagtcaaagaaagtatagtagcaaataaatagaatacccttaaaaggaaaccaaatgaaaaataatcgttactctcaccatatgcttgtgttcttattagcaagaaattcttttaaccactgtttttataatatcttaatgaaaaaatactgaagcgtatgccatattaaatccctctctttatttctagaaagggaatcaaaggagaaaattcccattctgctatactaaaagaccactaagtaaagagcctattagtgtatgataaatcccatagcaatatacattatcattttacagcttctttgttgaaatgaatgtttgtatgtgttgaccatagagtgggataaaaagttgaaattttgttttgaaatattttagaaatgcatagttgtactgcagttgtgaacctccttagatttttaaggaggctgcttcaaaggatctcattaataatcttctcaggtgcttacaaagcatgtgtctgtcagcagaattagagaatcacccaactagagaacaggtttcacaataccctgagacctattttgttcattagagaggaaaatggcttgttttgagtctaagttgacatgcttgctaatttcagcaataaaagctgttcattgtggtcaggtttaatttagagcctggtaaggttcagattaaagttgatcaacttacttttacaacatacttcttaaatgaactttgaaatcttaaaagaaggaaaaaagtatagcaaacagtgaataatgtatctaaaactgagaagcaaaaaaaatctggttatgtgagagtgaattaaaagaagaacaacccaataaagataatctttgttatataaaaatttccaagtatcgaaaagcacgatttttcatgtgagttacacactataccgaatatatttgtccactgccacatgcatagtccctagaatagtgcctagtgctgaaaaatatttattaaaatgaatggatgagtaaatgaatttatgtattttgccagccctgtgtatttaaagttctctgttaactttgaggtgaaaatttgacttcatctgaggtttctgggtaagtccgttttaaaaattctattgaacatattcaaacattttagggtaggcaattccaaagcaacctttcagcttcccatgtcacagatgaccagagtttcacattctaacactggaaaacatcttatttcataaaatctacctgctactatatggttcctactttaaaatttgttcagtactctccagctgacttatgccacttacttcaatagctgtctttggcaatttgttccatatttcaaacactctgttgtgtaaagaaaccataaaagttagaaacctgaaaattggattttttttctgagcaatcacagcttacaaatgtggaaaatttgttaaaagttagcccctccaatttttcaatacagagaggagaaagtgcctaaagtagatgtacaatgtttggaaaagttttttgcattattttactattaccaaaagcaattgagtttaaatcacaaagcctgtctccctacctcttcacagaagaaacactacagaatgatcaaaatttggcctttccaaaaccaaaattcgttagaaaatcagcaggagtcaaagtacagagtaaataactaagtttcatataagtttcagatacattactatctaccactttcatctcttcatcttcattggcctcatgtggtagaacatcatatttaaaattatacaaacttgctggcttgtttactagtgtggttattataagaaaaaaatgagaaaatatagataaaacatctgtcacatattgcttataaactaacagtaaatattacttgtattttccccaattaaaataaaatttactgagttttagaaccagagctagtcagatgcctttttttcataaatttcttcataaatacctctgagattgtggtccttaaatctagagagactaagatgacagagaaaatagacactgaagaaagggaagaatatcttaatgatttacattactacctataaattaaaaattgttaactttattatatttgtatttttatttaaaatagtgctatattaaagtcatttataatacaggggaataggaatactaacctgtaatctgatgctctccaaacttgcctaaatcataaaagttaattagataatttatttaaaatgcaagatttgcagccctttccactacatattcattagttctggagggaggcaaaaaggtttggtgattcttacggacaggcagcttaggagaaaagctgatttagctcgtctacttcaccttttcatttgacaggtgagaaatctcaggggtacaatgaagttaaataagtaatatctcttaaatcggttctgtgctttttctgtttttaaaataaatataccttaattttgacgtcacacagaatgatattataagtataaatagttatctatcttttaaatacattgtcgtaattcagaataacatttcttactcaaggcattcagacagtggtttaagtaatccgaggtactccggaatgtctccatttgagcctttaaatgaagaaaatctatagtcaagattttcatttgaaatatttttgatatctaagaatgaaacatatttcctgttaaattgttttctataaacccttatacagtaacatcttttttatttctaaaagtgttttggctggtctcacaattgtactttactttgtattatgtaaaaggaatacacaacgctgaagaaccctgatactaagggatatttgttcttacaggcaacaatgcaggatttggaacagaggcgtccccagttggaagaactcattaccgctgcccaaaatttgaaaaacaagaccagcaatcaagaggctagaacaatcattacggatcgaagtaagttttttaacaagcatgggacacacaaagcaagatgcatgacaagtttcaataaaaacttaagttcatatatccccctcacatttataaaaataatgtgaaataattgtaaatgataacaattgtgctgagattttcagtccataatgttaccttttaataaatgaatgtaattccattgaatagaagaaatacatttttaaatcaattcagggcttatatagttgcaaagcatgcattgatgggtgtggtgaccacagtgtggcagaacatttgtggcagaacatttgttctttagttgtcatctgggctggcatccatggagatgccagtctctccctcatatccttggctgttggtccaagcaggcagtggcttcttcctgggccatctttcattcccatgtgcagtgactttcagatctggatatctctccgctactttgatgcccccattttgtaatatcaaaaatcatcgtactgtaccttatgccgtagtagggtgggcaggaactttggtaagacccatctgactagacgctgtgcatattcttttcttctgacatacactcctatccatttaatggggagagtgattcgcagtgattgtgtgttgtgtcagtgagtttccatggggtcaggaagagtgacagacgaaggagtaggggaaactcgccacccggtttccctcagagattctcctcagaaatgaggtccaagtcagctctgctttcaggttctctcagatctctctcggtttcttcacttctctctaccttccttccctccagggacacacactggtattgaattttcttgcttcctctgcaatatcccctcattttccttcccacaacccgaagaatcctttgtagtgcaggaaggaggaaaacctttcagccatctttttttttctctttgaaatcttttgtcttttaccaggcttagacttttcaaactcggaaaccatgagagtctatatcttcataatttatattctgctatgttaacccttccctaaggaaatgactagttgtcaatatgttggggaaagtgaaagagtaaccagagtaaaaggttaatattttaaaatattattagtcatacttccacatattgggtaagtacttattgataatagctagtatttattcagtacctcataagcattagatggtgtgtgcacatgtgtgtgtttctgtgtgtttctgtgtgtgtgtacaaaatctttacagaatcttgtgagctatattttataatccccattttatagacgagaaaacaggttccaagaacagttactcggccgggcgcggtggctcacgcctgtaatcccagcacttggggaggccgaggcgggcggatcacgaggtcaggagatcgagaccatcctggctaacacggtgaaaccccgtctctactaaaaatacaaaaaaaaattagccgggcgtggtggcgggcgcctgtagtcccagctacttgggaggctgaggcaggagaatggcgtgaacccgggaggcggagcttgcagtgagccgagattgcgccactgcactccagcctgggcgacagagcgagactgcgtcgtttacaaacaagcaaagaacagagcttggaatttgtaaatgtctctttctgacttgaaaatctgcgctctttctagtatgtttaccatttcccatcttgttttgttgcttttgttaatgaccttaatcattgtactaagactaaatacttcttttgtctgaaattatgtatgttttgattcacttcctaaagacatgtcttctttcagttgtagtgattgctaattaaaataggctgttcttggttttgaaagtttaactctttattgttgcttaaacaatgaatgtggatgtatgctaatgtattatttcagtaacactagccactataacaggtaatctcccaaatcttggaggcttactacagcagaaatttacttcttattttagtgcagtccaaaataagcagccctctatgaagtcattcaggaacccaagctccttccatcttttgtgtccagagcataagactcatatgcatttaatgggcagatgaagaatgagtattactcatgaaaatttgtcatgagccacgcctggaaatggtgtgtgttaattttgttcatattctgttggatggatcttgtcacatggtcacacctaactgcgagggaattagggaaatagtgtacactgttgagcctaggaagaggaacagatttggtaagatagccatacaattgatttagcagagcattcctccaccatactggaaccttgagggttctccaacaagttgcaacacactgacccaaaagagtgaatcttagtgagtgatttactcaatatgagactgaattcccattacacaggtaagtgatcagtttcttgcctgagaaatatggaaatttggcagtgaggtttatgcaaatctgaacatactatacagagagtcatttgttattttactaatgaaaaatcacttcaattttttccctaagaggaagacaatatgaatgtattatacagtatttgttcaacattgtctgaacattttccattatcccctgcatttttttttcatattgcattgactttttcatgatagagattaaaattgaatgaccggagggcaagtttgtatctctctgccaatattcagtgatttgaatagttcttcttttctaagcttttgtcttttaggaatgaatacctttatgaatatttgcagcctagtggaaaggctgtaatccaaatggtccaagaaagcattttcttaaaagcaagtgtctgtcgagatgtgtcatagcgcttattaagagtctaagctggaatcttagttccaaatatgcctggagcctctaaatggtaccaggataattctgacaagatatgtttatctaaacaatgtcatttgcagccctgctacacttcagtttatctctccctttgaaatctataaaatgggatggaaattcaatactcataaacttttcgatcgtgttcaaaatagaatttttcttagtaaagatttggttttcaggaaaaggacagaaataaaatacttgctcataaaattgtattttctcatttgatgattttggtcttcctttttattgccatgaaacttctagaaatgctcaaaaagaaatcagctaaataaagaaaaaatagttaatatatgtatgtaatactatattgaaacatttttctttctctggtaaatcccatttcataactttgaacagttgggaaaatctatacatagttattgcagtctatcaagagaaaagttcagtacaaagctatttatgtctactagaaatattcatgttaaacttcaagtaattgggtgtgcaagccaccaccatgttttactatatgaaactattaccgtggtatctgttgtattcaggtaattatattgatggaaatcatgcagtaataatctaggtaagagagtaaattttgtctaaatcagatcaaatgaaaaattctccctctttctaatattcgaattgctcatttttctttaactctttggtgtctgaatttgtcaatcattcctggccattttcttctgcaaaagggctgggtcaggggaccaaaagcagataagattagaagaatttaaattttcttccttggaggcgtctgaattacatgaaactcttgttcgtgtctgttaatactgcaaggcataataccataataccttgcatagcagtgaagaggatttggaaagataaaactgcttccttttatcattctgtttatttcacaaacaatattggtgaatgtcgttcctgtaacatttggatttaagagccttgtttctgtagcttctccctccgtaacccccaccactaccatttcggggctatacagcaatagcatgcattactttaaaaggcaggctgcctagactggccacttgttagctttgtggccttgagcaaatgactaatctcagtaaactatctgctcttagtttccttctctgtaaaataggctcacttataactatctcatgggttgggaggattagatgaaataattaatgtagagcccttagatcagggccatagtaaaagctgaatgaatgttagcatttgttattttaattataatctattggggtgctttgaaggcttaatgcaaaatacttaatgagctttttggtagctgtttagttatttcgccccccaccaccaccccaaaaggagagatttaaaagaccgacaggagaaggttgcttggaaaagatggaataagatctataaatagaattaaacaaatattcaggaaagccttttgtgggaaatactgcaaaatttttattatctataaatttaataggtagataaaattactactcccattttagagacagaaaaccgagactcggagagctaacgtaacttgtctagggtcttaggaagatgacaagtgaggaagtagaattcaagcccacgtctatatgattttaaagcccgaggcacatcaaatggaaaaggctggttagtcagaaaaataggaaggtatatttatctgacaacttaaaatattaggactaacctcaggtaattatagtctggatatacatttttgctgctcctgtttatacttttgacttctgtgtatttgagtgtctaatcaaaggattgtcttttacatgtgttggagatgtacagactagtggaccccaatgatctattagctgtgtaaccttagccaagttaattctctttcctaaactgtggttctctcatctgtcatgtggggctaataatagtacttatgctggtagggtgattaagaaagtaaaataattggtgtttctaaagtaaatatgtggcacatattagatgctcattaaatggtacatattgttatggtgagatggatttggtacagagagaactggagatgggagaatatgaagggtgtataatgtggccttttattagctaaaccaagggaaggacttctgaaacagaattccaagttttaagagggagtcgtttattttggaattattttttcagctaaggatttttcaacccagtccagaattcttagagaaatttagtgatagcttataaattttaagaaaaggaattcacattatattgcataaagaactggtatacagggccatagaaggggagaatgttcttctgtatgagaataaaaaaaaacatctctcacacgatttttgaattaactgacagttttatagcagctttgtcaacccatcattcattgctgcaaccaaatctatgaaatccttcatggcgaaataaaaaggctctgttgttctccacatttgtatgaaatctctgttgctaatgaaatgccagccagtatcttcctctcaggtattgtctattagatggttgcttattttagaagaagtggagtcaaccatataaatttccttcttttgacatctagcacctgctgtcaacctgttatagctacaagcagctctcaaaattcacatccactaggatgccgctggcaaccaaagagttcagttcagttcagcgaacgtttgaatgcctactctgtgctatctaatatcagagatggtagaggggatacaggaaaaaagtaagattcagcctttgtctttaaagagctcacaatcaaatgtgggtatttggacaagtatatttaggcaaggcagtttaggataggtgcttcagtagagcagtattacaaaatgttgagagaaaactagaggaggagttttaaatgagggcttagtggaatgcttccaggaggaggctgaatttgacctggtcatgaataagactttgaaaagcagaaggaagctggagagggaagggtatttcaggaattgatgacaggagaatacataattagacctgttaacagtggggtggaagacgaatatcagcatgggagtgtgtgtgtgtgtgtgtgtgtgtgtgtgtgtgtgtgtgtgtgtgttgtggaggataagggagtaaatgaagtcagtaagaccagttagaaggcaagagagcccaagctggagcagtgaccatggagtaaaaagaaagaagtgaaattgagacataaggtggagctagaattaacaggattttgacattgattgcatatataaaactgtcaatctaagagaaggcctgcctctaagagttggagattgaattctttggaagattaatgtcataaccagagacaaactcaggataaggagttgattatgggagacaaagtaatgtgcttaacatgaagctagatgaccatactgagattttaaagaaatggttgaaaacatagagattgcaggagtgatgttacttttggacaagaattcaaaagttacctggaatgtctgagcttgcacagagagagggtacctggtgcaaagaaaagtgaacctaggaaaaagcctagaagttggtttacatttaaggaatttgagaagaggtagcaccacccaccccccacacaacccccaaccctgccaacttacaatatagaagcatttagacacacactgaataataattttttttttgagacagagtcctgctccattgcccaggctggagtgcagtggtgccatctttgctcactgcaactccgcctcccagattcaagctattctcttgcctcagcctaccgagtagctggcattacaggctcccaccatcatgcccagctaatttttttgtatttttagtagggacggggtttcgtcatgttggccaggctggtctcaaactcttgacttcaggtgatccacccgcctcggcctcccaaagtgctgggattacagacctgagccaccgcgcccagcctaaataatgaatttatagatgctacactgtatggtttcctttttctgctgctgtacaaccattcaagtaacataagtttcatcctggttcttaatgataccatgaataaagtatagaaactctttagctgaggattaaagattgttgtgtttaggtagaccaggtttctgatgcagccctcagtataccagggaaattagccattactgtttgccttgtaggtctaatgaaccctttagctttttattttgtatatgtctaagttactctacaaattcttatggaagtataaagagatagtgaaagacaatcttatgagaaattttaataagaattgaaatacaggctgggcacagtggctcactcctgtaattccagcactttgggaggctgaagcgatggatcacctgaggtcaggagttcgaaaccagcctggctaacatggtgaagccccatctctactaaaaatacaaaaaaattagccaggcatggtggcgggcacctgtaatcccagctactcgggaggctgaggcaggagaattgcttgaacccgggaggcggaggttgcactgagccgagatcacgccattgcactctaacctgggcaacaagagtgaaactccatcgtaaataaataaataaataaataataaaaaagaaatacaacttactttttgtatcaaataaattttggtgcacaaacatcataaatgacataatatctgtcacacatcctttagcaaaacaggattgttaaaattcttacagctaatattatgtggtgaagttcttcctgttgaataattaagtggattaaaatatcatatttcctttctgtcattagaaatatattgtgcattaatcagtccttgggcctgagaacatttatctaggttttcatcatctgaaaactcacagtccaatatttcacctgtattatcaattcaccattatcattagagtttagaatgctgctgtctctttccatctatcttctgttgtatctaataattaggagatatatatatatatatatatatatatagagagagagagagagagagagagagagagagagtgagagagagagagagattggtaataatactaatatatataataatattatatatatacacacatacagagagagagagagagagagagagagagattgattttaagccattaactcatatgattgtgggagctgaaaagtcaaaaatctgtaaaatccaaaagcctggcaggatggagaccaagggaagagttgatgttgcaatcttgagtccaaaggtaatccgatagcagaattccttccttttctggggacttcagtcttttctcttaaggacttcaaaattgattggagaaggcccacccacattgtggagggtaatctgctttactcaaagtctgctgattgaaatgttaatcacatctaaaaaataccttcacagcaacatctagattggtgtttgaccaaacaactgggaaccatagcccagccaagttaacacataaaatttaccatcatcagccatcatcatgaggttcataatgtcatgtgtttcttcacatataaatctcgtggttcttttatttttttagtagtacctagttaataaggtacctggaaatatacgttaaataatagaaatggtctttaatatcttaatgaatttcagagttctatcagagtaattgtaacttgtatataaaaactgatatataaaaaacaagtatgttttttcttcctatacgttgtgttaaattaatactaattacctatcatgaaatgaatgttttccatttttcataaatgtatttcatttttaaattaagaggattaatatcaaaacatatttgaataggatttaaaatccaaattacctgttgcgattatatttaattataaatctttcaagtgagtttataataggaaaaatattttttattaaagtgatgtaccataattatgaacataaatagtgttttctactaattgtttttgtcttcattatgtttctttttaaggggaaagatctgggttaacaaatgttttattcatccaccttgaaaattaaacataataaacaaaactattaaataaataaaccaattaaagaaaatagtttttcttccttttttgtgataaagatgattatgagtaaatatattaaagaattttatactcagacaaagtgagctaataagacaaatacaaacagagatgagcccagaaagagatactctacatgtttataggctagcatttttatcttatgacctacagggtcattgtaactaaagtcttgaatttctgttatattttggtacctgtgggcataaataggaatattactccctgatggcatcatgcattttagataaaactaagccaagggttaaacacgtgccatggactgttcctaaaaaatgctctcagctctcaagttatagaaaattgtagggattattattttgtacctactacttctttctttaccaaaatttacttatacatgatttgaaaattgcttgccacctgtctttattctgttgtacttgtcttaagtaaaacatttataaagtaagtaggaaggattaatagattgtgacctttctacatgaaaaggggaaagccgagcttgttctacttttgtcaggaaagagtttgaatagttacctgttactgtaaaacaatcaccccaaacttagtgtcctaaagtagcaataatcatttattatcactcataggttctgtaggtcaggattcatgcattgcttggttgaggggttctgtctcacgatcactcatgatgttgcactcagatgtcaattaggctgcagtcatatgatggcttgactggggctgaaggattcactttcacagtgagttacttgtatagcttgtgagttggtgctgtctagttggtttccctctaaacgagttcctccatgggactacttgagtgttcttatgatgtggtggctggcttaccccaggacaagcaacctatgagttttgccctgagttttctgaaacatgatcccatgttgctttgaatatccccattagacactcccacaaatgtcaatcatactctttgccctaaaagttgcagactacttgtacatgtcctttatcctacatgtgtacaggaaacacgtgcagaataacatgtgtttttgtttcttgaaagaaacaagaacccaccaaaactttatagctccgggacatgatgataattatctcaggtccactcagcctggctccacatggaaaatatgggtattgtaaagaaagcttttgaattttggaggcctaacaaaaagacctaggaagctaatagttggttatgagataattataacaatggtgatgaaagcaattgcgattattacttttatgttagtgagataaatacataagaatgtccttctttaatttcattccttaatttccttaatccccattcttgatttctggattagaggaaagctatactatctacctgattacacaaaaagactggactgaggggtaaccattaggactcttgttagttgaaggtaataaactatattacttcagtggctaaaacaaacaggagcttttttctcatataaaactagaagtcaggaaacaaatggttgctgatgttggtttatccgtttgacaggttctacctttatcctggagattctttggcctttatttctttagtaatatagtagtaacagcactgaatctaaaataagagcacttggtccaagcactggctctgcccccttagtgacagtgggacccatggcaaattatttaatctctccaacagttaattttctcatctgtaaaactgggatcctgataacttccatactagtttggtgttaggattcaatgaaatgacgcatggaaaagtccttttcaaatggctactcactatacaaatattaatgtcttagtaagctcaggctgctataaaataatgccatagactgggtggcttaaacaacaggcagttgtttttcacggttctggaggttgagaagtacaagatcatggtgctgacagatgtggttcctggtgagaaccttcttcttgctgtatcctcgtatgttggggagagaggtggtgcagagaggtactctagtctctcttcttgctcttcttaaaaggacactaatccaattatggaggcctcaacctatgacctcatctaacccttattatttctcaaaggccccacctccaaatatccattgggggttagcacttcaacatacaaattttagccggcgggggggatgccagcattcagtccataacaatcaactatcctcattattgagagttccactaggccttctcaagggttgacaatgatagtgccctgctagctataagagtaaaaaaattttcacatctagaaaatgggtgcacgaatattggtaactgttctaatgtctatgcacagaatttttagaacttgctcgagaaatttgtctttcctgacagtgttgcttctcttaaattccagtcgagggccttgaaaaaaataggttttccatcaagattctctgaatgaataaatgaaatgctctgatattttctttcaatattaagataaagcaaaatgtatacagaattttctattttcagtgtttccaattactgcatggtttggcttattaccatctctaagtctaaccctgggtcataggagtaaagccattgggggtcccctacaaaggatacaaggcagtggtagatacaataagcctgacaattggagtcagatttttctctttcatacaggaaccatggaactgttgccctgggccacagctggctctcagaaaaacgtagaactggtcgaggaaaggaaaggcagggagtccttgattcacttgttatcagaaaattgtctgttcaaacaacagaatgtttgaaaagataaaatcaagtctcaaatgcacagaataagaatgaggggaaaacacctttctctgtaattaaacagaaaagtgtgccatgaagtgataaaacccagtcaacctgaaaatgtgaacatcaagtgtaattgtgcagaacgataaggtaatatgaacagcacaggaatatataggctcacgttggcattttaaagcaatggcactttacctgttcctcatgaaggatttggtttagtctaatcccttgtaggagccactaagaggagaaggcacagtccttttgggatgtaaaatggggaattctttctatgattacaagaatttgtaaattgctcagagttttaggacagcaggttatgtgtctctcaatgttgggtaccatgccaaacgtactttaagagacatagcaataaatagaatgggattcatttttttcttaatgtctggcagggcaaccaaaatgcccacgtttcccttcagtagcttggtattttggtaactaaaaacatgttccagggaactccagaatatgaaacatttcagacaatttgaaactgtcaaaattttcacttctttatgggacaaataaaatctaactttattcagattttaaagtatctcataaaagagtaatactttagatttgtgctgtgctttatacgaattggatgaggaactcttatacatatataagtggattttattttcacaacagtccctatggtagatattgtccttattaagtaaatgagagaaccaactatcaaagatattaatattttgcataagatcacacagatagcggaaccaggatttaatccaactcctctgattctaaaaataggtgttagatgggtattctttccccaaacctatgctgaaaggaggctacatttggagtcagttattgaaagtttaaatatatgtgtatatatatatatatatgtgtgtgtgtgtgtgtgtgtgtgtgtgtgtattcttatatactcatgcatgtagatagttataaagtacatgcttatatgtcaattttatatatacgactgatatataaactatcaatttgtgatagtttatttcaattaagttcaaacatattgggtatttattgactcatgggacttaaaatttctcagaggcattaatttctatgcctttaagcaaaataatgtttagcccgttttagaaagataaaaggctaacatatgttttgtttttgtttgttttgttttgttttgttttgttttgttgagatggagttttgctcttgttgcccaggctggagtgcaatggtgcgatcttggctcacagcaacctccgcctcctgggttcaagcgattctcctgcctcagccatctgagtagctgggattacagacacgtgccaccatgcccggctaattttgtatttttagtagagacagagtttctccatgttggtcaggctggtctcgagctcccaacctcaggtgatccacccgcctcggcctcccaaagtgctgggattacaggcgtgagccacggctcctggccgctaacacatgtttttaaaaaataaacaccattcgagtaggaaaagtgggagaactggtggttcagctagagatacggagatgggagggcaagttgctttctcatgttgccacatctgtaagttacaaatgccatagattaggaatttcaacgttgttgtgtctctctgaggacattctccatgtagtatatgtttcgcctccctgatggacagtaagcatcaaacggttactcctttatatttgaattattttaattctaacatcttgttctgaaaataacgggaatgccataaatacttactgattgattggactgtctcgcaggggagctggcagctagtgtaggctacaagctgccatcatcatctccatgaccatgagtcatcactggaattaccctaaagaggttaataaaacgccttgtttgaaaagcaaacaaaaagccagaagaaacccaaagcaaacagacccagactttgcaatgggtagtgaattttcagtcttaagggattgagagtccttttagtacaatctctcataaacatataacagattttaaaagcaccttggtctgattccagttcacatacctcatccttgcagaatacaacatactaggccatttgaaatgttcctcagtttacttttggaggatctgctgatttgagcaaaatggaaatgaaatgtatatagaaagctcttaatttttttttttttttttttttgagacggagtttcgctctgtcgcccaggctggagtgcagtggcgggatctcggctcactgcaagctccgcctcccgggttcacgccattctcctgcctcagcctcccgtgtagctgggactacaggcgcgcgccaccatgcccggctaatttttgtatttttagtagagacggggtttcaccgtgttagccaggatggtctcgatctcctgacctcgtgatccgcccgtctcggcctcccaaagtgctgggattacaggcgtgagccaccgcgcccggccagctcttaatcttaagaagttcagtttcgcagctccccccccaccaacccccaatcttgaaagcaggaatttggattagggttttttaataaaactttctttttcttattaccatgatgttttttgagagggtacagagaactcattaaaatgttatgttataacttaagacaaaatgggaatgagaatttgcattatataaacaaagtgtatgactaagtaacctgttacatataaagtgtttgactaagtaacctgttgtccctaggagaagtagaataaatatcaacatgtggcaactaacagaatgtgttgtgatcactaaagcagcacattcattgactttacacttcattaagtaggtaacgaattttacaaattttaggacttaaccaggctgtccataatactttgcatcagtaagtaccaaaatctacgatagggcacttcggagttccttaatttaataatattgataatattttgtttacattttgatttaattgtatcatttcattatttttgtgtcctgattctaaatatatacgtcaacaagctatatggccattcaaaacaggtaaactttaaatatgtttttgacatagaaattatgtaacagtcttcatcatgagtataggagtcagatttccaattgaaaatttcatcctctaaaatacttggcatatgtatacagttgtctagttcagacaaaaaagtattgaatataaagttgattttgtaaaaccagaattggcatccttaaggaatacaaataaagggaatcttaagataatataataatgctgatttgaaatgaaaattaataaaattgttattctattttagtatgctaaattggacagatccttatttcattgaaaaattagattcttcagtatatcagtgcactgtgctaataacacaagaagattaaattatgtccatatgtgatttggtagaatttaattataaatataataaatccttcaatatgtacagcagtgaatattccaaatttatctctcatataagttgtgagcaacttaaggataggcaccatcccttaacatacctagattaagaacagtacctagaaaacagtcatcaaatgcttcctaaataaattttcaccttcaagcttatggcagcaaattaaacatagattgacccttttctaatagagacagaatagatgagactgatgacttttttttataaatgtgtaagtctgcaaatatttagtaaggatctaatttacacaaagaaatcaacctagagtgagattattttattcatttcccggaggctgtgactgaattatatttgcaacttgccctaatttttatacttaataatttgcattagtatttaaattatgtgaaggaaaaatataagtttaaaatactgaaaagtatattcacacattcatcaaatgttgattatgtgcttacagtgtgcaaggtattggggctaggaattatgtggtgttccaaggaaaccatgatacagcctctttcattacagtgtttattattaggtagaaaaagtaaaattagtataatattagataggatatatgtgtcataggagtaatataaacaatattttatgaacaatgtatgaaggtataattttgttcatttatccatttatcgctctgtacatccatccgtttattcattgttcattacttcatttaataatactttagtgaccattggaaaagggatttataaaagtgagtaaaatgttaatcattttctaaagaagttgataatctagggaaagacaaatgtgtaccaacaataacttggatataaagcataaattagaggtacaagcaaagaaaaatgaaagtacaaaggagaaaaatatttggctgcatgagagcagggactgtgtcttgtttcatcatagattttccagaacctagatcagtgtttggcacaaagtaggttcagatgagtttgtgttgactgactgtctactgaagtaattgtggaacatatcatagaagaagtagatcagaggctggatcttaaaactgggagaaatacatttcagctccgtgaaaccccagaagtgatatttgacattagaaagcacaaagtcacactctaacagtgacagtactgagtgaagtaagaattttctgcaccccttcttcttcttccactcccattaacccttgttagggtgagaaatagcagctggtgaatggtagagaagactagcaagacagaaagaggaagcccaccatgcccactaccccaggtagtaaaggacctgtccacttccatcctcttctaattgaggaagaaatcatatatgtgagttcagattgaagtattgattaatatattgagctggatattctaattttaatgtctcgatatggagcaggactttgtttccttaatgatgaccagaaaagacatgaaacttacccatattttcacccaagaacagaacagaacaacctacttgaacagatttaaagggagaaccaaaggcagataaagttgtctttattcttacacagcataagtcctgattattcatcaatttatacattttatgaatttaagaaaaaaggaaaggaagactataaagggattcatatcaggatacacatgaaggtaatgtagtcagttttttagtggaaccaaaatattacagtcatcactgaacgaaaatattacaatcattacatcattcactagattaagtgaataaattaaaaatatattaaataaaattaacaaagacatgagcttttcaaagtgtgtggtaacctggagcaataagcagtgtagttggaatgttacctcttaaggattatcaaagaggctggctgttcagtaggacagtggtatggtaaagcaagcttgctacattgcagaactccagagggcaacattctaattatctttagctatggggtctgttcccataggataactataacttagtaggttgacagagcctcccaagaaaccacagcagtgctcaattgtggcgaattacttctctatcccatcaaaatgtcgtgattggacccacaactgtgcatacatttttttggcattttcctgccagaagcatatttacatttctttaatatccagtcatatccttcccttatttaaaaataattattcagagaattccagttttttgtaatcctctcttctatgaattttagcaacacttatatacagatacttgatattctggagaaatatgcttcaagaccatgtggattaacagattttcaaatgccgttatagtatatgtatatactatatatgtataagtatgtgtagtccccaaaatgcgtactttaaaatcctcataatagatctcttacagatgaggaaaagaagatgtagaaaggttacataaagtagctaacaagtattccaaataatattgaacttcagtctgactattccaaaattgcattcttaactctgatttctatatttgttttccattctaaactgtgtattgtgatataagttcctcactaaggctctttttcagggtcttcctaatactaaagtcactcttacaatgagtattttctttacgtgtgaaatccaataggcaaaaaaaaaaacttggcaataaattttaggcattaacctcatgccaagtaattatcagaaggctgtaatgctttgaaacttcacaagtctgattttaagataatggaatgaggcttgcattgtgaactttcttgatgctttacattgcaatatgctgtatagattgacttcctaaaaataaaaaataaaaaaaaagatttgtagagcatactgggaaggtcttgccaattaaaaaccggagattggctgaaggcttgcagcaattgaattttgaatacagatggtgtcaaatcgagtgtttccatagcaacagactcttccttaataacttttagatgggagggggtacataaaagagaaaaccatcttttagcagatgtatgttttcagcatgttttcagattgattttggaagctaatttgtacttaactagtgattgttttaagtggatctaaatattactaaattctcctgaggaaacattttgagaataacagaaataaactctaggaactttataaagacatgaaaagggcacaattttacaaaacctttttttttttggtctggagccaatcaaacagtattttatattgagtatgacctatcaatagtcaaagagttcttgattcttaatgcctgttaatattgaatgtttagaatatgggtaaaatcaaggaaaaagtgctatgtatctcatggatttggaatatcttaatatactctttcttcaggttaatgattatttttaaaaaatgatgatataaatcatttcaggaaggactgcataaagaggtcattgatagagttcatatcatatagcagagttgtcgtagatttaatgtccaatcctcagttttgcatagccaacaactaaattttagtagtttacctagagatgatcaggctctgggagactgattcatgctacacaaactcacaaggcactggtttataaaccatttgaaagaagaaataataattcaaactattattttacaacaagactggcaggaaaatcaataatggtaatgtgttcggggtgtcctccccagtgaggactatccagaagaccaaatgatagattattgttcaaagtgatagaattgggagaagggtaataaagcattatgaaaggatgcttccttaagtgagaaaagctacataaactacccatctttactattctagatgaccttaaaaatattaatagaaacagagaaacagacaattcatctcagatggtacaaaaaacataatagcacatgtttgctccctggcttccttttagattccctgcaagaggttttcccccaaccaccaccatatacagatatacagctttaccttcactctcctattatctgtcacagaacaatataaaactcagatatgttagtataagttaatagttggtagctttatgttaatgacattgctacctgttacccccagattcatctgggttacttcatccccaaaaccctttcaaaacgacatttcccacaaagatttctagtattactggccattcccggacatcttgcttccaacataagaaattctgacataatagggatataagaaggccttgggaatctgtatttataacaagctccccaggctatctgaggctcagccagtttatttttgcagatagctattactatccacaatctcttttatcctattgtaattgcagaagaaaatctttctttctagtttctttgaaatttctggaatgttaggacttagagcctctaggaacttgtacataaaaagagagacttaaagagatatcaaagtagagatagagatagatacagataagtgcatagacatagaagtagacatatataatagaaacatatatgtatacatagaaatagaaatatgccatttagaactcttaagaaatatgtgcactcttaaaatatagtttaaaaatgtaaagaacttgctattaattgaaaatagcataataaacttaaatgaaataaggaccccaaacgcaaatatttctctctgacacaccacacacacacacacacacacacacacacacagacagagagagagagagagagagagagagctgtacaataacaaccaattcctgacccagataaagaaaaaatttttatttatcttctttctcattctattattattttttctagattaaattaaaatggtaattatgtgtaagaacaagcattattgccatataaacaatgcaacaaaggaatcaattgaaaattaagtgaaaataaaaggtacagcttcgttaaagacccagttcttagagcttagtctcaaactctttgtactctgcactcttttcttgatttgactcgattgattgattgattgattgattgagtcagagtctcactctgtcacccaggctagagtgtagtggctcaatctcggctcactgcaacctccacctcctgtttcgagtgattctcctgcctcagcctcctgagtagctgagactacagacatgtaccaccatgcccagctaatttttgtatttttagtagagatgggacttcaccatgttggtcaggctggtcctgaactcctgaattcaagtgatctgtctgccttgttcccccaaagagctgggattacaggtgtgagccaccacgcccagccgattttactctctttagaactgcaaaagtaggaatctagctcatatgcagacattctagaaagtttgatttcaaaagtcttctcaaaagaaagagagcaagagcaagaaagaaagcagagagagaaagcagaagataaaatggcattgtttgaacagggatggaaactgagtaagaaatttggtcactaaacactttagtgtctatcatttaagattgtaatttggttatttatcactggaaagtgattaataatctaaaatgcattttataatactaatactattaaaacattaatttttggagaaagtttattatagattgatttatacttaccactgaatattaaaatgtttaatggaagtagtttcaaatagtatttaatgatatagggaattattacaacattaatgctcaggaaaaaaagtaggatatggaattatttatgccataggatcctaattttgtaaaaaacagagaaaaccagcaaaagaaattataactggaaggaaatacatcaaagtggtttgcagttatcactcatgaaattgaggtgaacttgatttttttccttttatatccatccgtgttttaataccacagacatgctttagatctgcccgtatattgtggctttcagagggtaataaaccattgtgactcagaaatagctaagaatttttatctctcaagaacaaattttcactcccttggggtgtcattatctgttgagaatgcatgcaatagttcaagagccaaaagactctgattcagtaagtttagggtagaaaaaaattaagtacatttttaaaatagagctctggtgtttcaaaggcaatgtgcaaatatacctacttaatattattctaattttttcaggatagctgaaatataaacatctatttttagtaataacacaaatgatggaatgcttttacatatttataaatcattaaggatttgctttttgtttctactgtctggaacatataaatttgaacacaatttagaacaacattcaggaaatatgatttatttattaccttcttgacctttattttatttttaccatctacttttatgtaagtcttttttttcaatcattgtttatttctttacttttccttccacatagaattaaagggagattcgggcttagtgtccttaattcatagttccattgtggctattaaaaggtgaactgaaagcttgcaaacacgtggtaccttgtagataattttctccagtcagacagttagataaaggcctctgaggtttctggggtcattgttgaagctatgttttaaaatcctatatccttctctcattgttggttccttttcacaacacagaagttttcttttttttaatttcaacttttagatacagaaggtgcatgtgcagatttgtcacgtgggagtattgcatgatgctgaggtttggagtacggatcccatcgccatgttagtgagcatagtaactgataggtcgtttttttaacccactcccctccctcctccctctagtagtccccagggtctattgttcccgtatttatgtccatgtgtgctcagtgcttagctcccacttataagtaagtgagaacatgtgatatttggtagaacttttcatttttaagttaaaaaacaaaacaaaatgaggatgagtggaagaactattcagcacagcaggttataaaccaattaggatgatgacgccctgaatggagattttcatgaacatctcatattagctatttcagctttggtttttttaatgttcaaagtaaatagaataatgaagaggctatttaggaaggtttagactgagggaaaaaaatcctttcattaggttccaaataacggttagcttattaaacagcaagaggcagagatttagcagagaaaaaataaaaagatttaaaaaaaaacaacgagattaaaaggtcagtaataccattggaactggcagcatggcaagtttatatcagctatcttttgttttggaacacaactatgctaattctgttctgaacctcttgctaatgcctgtctcaagaaaatttaacatactttatctgtgtgtacaaaaatacctaaggacaaagctattacccaaactgtattcagattgaaagaatccatatagaaatttgcagctaacgtattagtcagtgtatgtaatttctactgcttcacagcacaactctttctaattttcaggagcaatatagcaactgcttgccagccaagagaaaaccataggagcattcttatcattggagccaacattagttctgcctacagtgactaacatagatgcgtttattgctagctggaattttccattggcactagttacatgtaataagttagtgctttcaaatggaccgtggaatataggaaaactagagtctgacgtaaccaaaaaaaaatgttgataaactcagagattatgaaagagaggagaggagtggtttttgtggaaatgatagaaaagcaaaaaaagatggcaggatttggaaaaaagaaaatcaggttagagatttaattagtaaaggagctccttttaataattatataagagtatgagtttagagtaactgcctggctaatatgtacaatcttcaagttcagtcgttttccaaaattctaacttttagcattttttttttgtaaattttaagtggaaatcttccacttttgttgactaacttggctacctgatattttactcaacctcctactttcttgttctctacttcttctgagtctttgcttccacaatgaggtagctcatattccttaagtttcctgtctggttttgcttttttttttttttttaacagctaaaataaactctacaagcatttctatcattttctttacatccaatctcttgtcagccatgtcctaatcactttggtaaagtatcagtgaccacccaagaggttcactttgcttcgtcaaaggaccacctgtcatgctttatctccagagcttctgccttgaaagtaagaataatataacctttcctgaatgtcttatttcaatttcatgcatttgatctgcctcttcagaccattcccaaggctttgcccttgttctttaccctcatggcttcagttattcatcactatatgaatgacagctctcaaactgacagctctggcctctcacctatttcatctattccatatggcaaactgtctatattacatttcatcatgagggataattataattccacattcaacaagaaattgtgggtccgtgttgatttccaacagcaacctttattttttagactatgatagagaaagggtcaactttctctcttacttatttatctcaaataactcaaagtcaagctagaaaagccaagcaagtaatatttcccaacaaagcagctttaagcaaaatgattttcagacacgacatgcagcctgtattgtggaagaagcacagtgacctaggtgtactttgctgaaaagcagtggtcacagtccattagtttcatctttttcctgcaagagagaaaagtatggcagggccaagactcctaagaccccttaaaaaattgtgaggtttttataaccctgttcatttcccatcaaaagcattcatgaagcacctgccatgtaccagatgatgcattctaggcagagggaagaacttgggcaaagtcctgtacattttatcttctaaatcttactaatcttttcttatctttccatctaccacccaccatcaggctgtgcctggactcctatgctaacatcttactctgtttttctgcatcttttttgccctcccctccaatctactctccaattagcaacatgactaatgttttcaagcccagattagacggtgtcacttccctgctttaaacctttcagtggattcccattgcactgaggttgaagaccaaaatctttaccataactcacaaggccactgggagctatgaaaattttcttttttagtttttccttttaattagtgatgcattcaataagtggagtctatcgtgaaagcatagattccaaaggcatgtgaatactcaattatgtaatttacttacagaatgtttattacttcttttttagctttgattttgtatacatcctaactcaatctcagttatataagagattataaaaaagtttgtgatgaatgcatacataaaggaacaaataattaacaaatatataaagacaaatcagtattgaatgaccaaatggctctttatttattaaagaacttagaaaaatatagtcttgcttgagaccaagttctggcaacgtatgtgtgtctttttgtttgggttaaaaagcattagttttatatgttttaaaaggataggatcttcccttggctgcaaatagtataggcaaaatgctattctgtatcttattttaaagaaaataacaatcataccttattatttgctgacagttttgcagtttacaaagcactgttcacatggattaccttattttaaattcctcaattttttttccttttactatgggaattctgtttcaggagaatttccctttaaaattaaggtgattatactattctgttcctgtatttcgtagccatatgtttcaccaaggtattgtctctctccaggtctttcttctctggatgtatagttatgattttccaggaggtaaatgaaaacagtgggagcaattgacagagtgttttttgtttcccataaacccaagcattgcatttaaggagctgctgtactattgtaagagttcctatactaattttaaaagttcatttacatattttgtagatttttaggataagtcatcagaaaaaaattaaaaataaatttacatattttgtattaagctgttttgttacttgaatggggattattggaacgaggaaagaattacttttatctccccatttttcaaatcatttactataacattcatgaattgctgaagtttaaacaatcaaaaatatctgaaaatggagcctaggaagggtaacttatgtctttcatactccttcctttttggtttttctaccagcattttagtctaaaatatattttattttcactgatcctgtgtttgtcttaataatatagtatgtatgttaaatgaaccagaattcattgatctttttttttattattcctctttttgcttttctggagaagcatttgaagaaatcagttcaggctacacttcatcaattcatttcctcatcttccccttaatacaaaagccccattttcactcttcaaaacatttgatcacatacttaattttcatagcattgactaaatgtatgtgtttattttgtttatatattgcatatttgtgatgattttcacttttacagtttaggcatgggtaggaaggacacttacatgagtacttaagttcttggttatgacttgagaaactcacaaggtagcatggaatggcacgtaaacaaggctttgatagggtgaaagggaattatcaggacaaaactgactagtggcagtgacttttgagcagagtgctgcaaactgaaaaggcagagagcattgtaggcagagagaaagcatagacacatgtgagatacatgtgaaatacttagacaaatgtgaggtgtgtggtaacattgtacatacctagggctccttcctgtgtagctgtaaagctggagtataggcatcacaacaggcagcagaagccaagaaactagaaaagtagacaaaggccacgttataaaagatcttgtaggataggtaaagagttttaatactatcctgaaagcagtgtggggtgggaggcatgacattaaggaaatttaataagtgatgaaagaccaagattttcatcttcagaagacttctctggaggtgggtggaccacttgatgtcaggagttcaagaccagcctggtcaacttgatgaaaccccatctctactaaaaatacaaaaaaatagctgggcatggtggtgcatgcctgtaatcccagctactcaggaggctgaggcaggagaatagcttgaacccaagaggcagaggtggcagtgagccaagatggtgccactgcacttcagcctggatgacagagggagactccctattaaaaaaaaaaaaaaaaaagacttctctgactagagttttaaagaaggatggggagtgcaaaaggctaacattaaatcagtggttctcatccctggctgcacgttagaatcactagggggagtttaaaaaaaatgccaatacttggactccaccccaaaccagttaaatcagagccttaatagggcccagacattcgtagtttttaaagcagccctcttgattcaaatgcacagacaaggttgtgttccgctgaactagagagaccatcaggaggcttttaactaaagcaatctagggaagagagagatgaatgatatagaggccagaagagctattaaggagaagtgactcggcatcttcttggttaaagtataaggaagaaagaagaatgaaggataatttgcatgtttctccttcagtgactaagtagaggaacagatgtgtatcagtgattaggggagaggaagaatgaagatgatgtaatccagtttggatatgttggctatttcatagagatttagtaggcgtttggctctatggatacagagttcaagagacaattcttagcttaaaacacagattttactctgattattttagagatagtaaatgaagcaatatacatacatgaactcaccagagagaatatgtaaagtgaaaacaaaaagatcaaagggagacccctagggaatagcaacatttaaggaatgggcctaagagagtgaggagtggccaaataggcagaataaaatccaagaaggaatcttccatattaatcaaaagagaaggtttcaaagagggttcgtcaattggcaggtactgaagggatatctgaaaacataaagactttagactctctaatactgtagcaactttaaggtcactgctatcacctacaaaagtaatttcagtggcaaaagccaaaacgtaatggtttagaagggtatgtgaggtgtggatgtggaaatagtgggtatagactattgcttctcaaaatgtaatcacctgaaaaatcttattttaaaatgcagattttgattcattagctctagagtggagcctgagattctgcatttctaacaagttatcaggtgatgctgatgctgctcatacacaaaccatcctttaagtagcactggtgtaagccactctcccacaaaggaggaagacatagggtttccatcaggggacgcaggtggggtgtaggaccaaaggaaataatactcttttgtcttttgtttggttggttttggttgttttcttcttaaaataaacatggttgtagacggagattgaagacataggaggggtaaaagatggaatcacttctcatagaagatggaagagactggaacattgagtacagcgagggaattaggcatgggtaggagggacacctaaatctgaagagaaggaggtaaggaagaattgaaatacagaaaagttctgtcagtaagcaatgtatggaattgtgctttttagccatagtttctgttcaagaaattgttttccatttatttttatttcttaacttgaatagttggatggtggagtatgcttgtaaaaataagagtgaggccactttgtttttcggggttaatttccgttttctgcactcatcaagtaaaagttgaagtggcaaggtgtagatatgaaattcagtgtgtgctaagggagaaaaaaatgctttttattctacatgattttaaaaatatttatattccaacaaatgcatcaaatttgatgtgcaaatttacagtgatgaatgagttttattgtgtgcattgcatgctggtgacatggtaataaatctgtggtgctagaattataatggtcccctttagcttcgctttaatgaactcttgctgaacacttttgagttgttagtactttatttgctacatttggcacttaattagttaatgactgagatgctggaccgatggatcatctaatgatatgttaggcctattatcacatctagatagtttcttttctgtgacttgtaagtgacctaagatgataaactgaaatatttttgcatagatatacatcaagcttttctcctaacttcaggctttcatcttaagcaatagtttccaacacccccaaaagagaagtcattatgtttttaaaaaaattattcattttaatgtgatcaaataatatcacatttcagcattcacctatttaattaataaaacaacttacatgtttcattatgactggatgttgatattttttcataatctattatcctccaaccagtggtaaaaacccaatcctcctctcacccagctcatctttccgtatgggaagcaatacatacttccctatgttttattaccaaaacaggagaatgagctttctttagaaggttaactcattttctctattagaatattcagcatacttttaaggaggtaatctggtctttgacagtctgttgattagaaaattaagagacctgcctaaattccatttccaactcctctccatacacattgtgactttgagcaaaacgttttgccatttccactcgtataagttctgtttagtatctttaaacttccatatcccacagatggtatttttttcttcattggaaagtggtgttagtgattcagaaaactgcttaaataatacactgctttgtgttttctgtgagagaatttttttttttttttgagacagagtctcactatgttgcctaggctggagtgcagtggcgcaatctcggctcactgcaacctctgccgcccgggttcaagcgattctcctgcctcagcctcccgagtagctgggattacaggtgcctgccactgcgcctggctaatttttgtatttttagtacagacagggtttcaccatcttggccaggttgatcttaagctcctgatctcatgatccgttcacctcggcctcccaaagtgctgggattacaggtgtgagccaccgtgcccagccgagagaacattttatctaacattctattttaaaatttttcaaatacacagaaagctgaaagaattgtacagtgagtgctcatgaacccactctctagattttgttgtatcactttacttctttctctacccgccaacccctattattttctgatgcccttcaaagtaagttggtgacatcggttccctttacccctaagttcttcaacatgcatgtcattaaccagagctcaatatttgttcacatttcttttgtttgtttgtttgtggcaaaatttgtatagactagaatgtgtaaatctcatgtgtattatgaaatgagttttgatgaatgggtatacctgtgtgacacatgcctctcttaagatacaaaaaaatagccttggcccagacaggagggaacattttttaggttggcttgagtttcctttaactgacatgtagcatgactgaatatatgaccataagattgccaagttgaaatttaccaaaggtccatccaggggaacagtatggctattgatacgtcatttgttcatctaggcactgggctgggtgagttcttcacaaaaaccttgtaaggtgagctttcagctctgacagaggcatcaagaaacgtatttcacaaactgttagagctgaaaacatctccagggatcatccaatctatcctcctttgctttatgactcaggatttaagaagccccagaaaagtccaacagtgttaccaaagtacacgattgcctatttacgcccctataattgagagctgtctaggggtcaggtacttttctcagtgccttgtgtacattatttccttttatctttctagattattaattttcttgttattatccccatataatagaggagtaaacagtgtgaaaatagcactaaactgttgatcttttccatgttccaaactaaccttaaatgttaggctaatattataaaattttaaaatttagtcatttgttctgggtctggcttccatgaacttaaccaaaatgcttggctgtttctgcattctagctttttgggatttagagaaaaagcaacttggtcatcatagtggccaggatttatttatgtgccaataactcccctctgtttttagctttttgatctgttacatctcagatactttattctctatttgtaaaacaaccacattcctccttttctatatctaagtgaaaaaaaatgcccgttcatactagctacatggttagcatatatgtttcttcctctttgtgggtttgagttgaaacttcttttgcaaagcttaactatagataggtcttccacagaaccctgtttaaatgccttgtggaagtagaagggacatatcttaatattccttataatctgtgttattatttggactttcctcagttccttatatgtctttgtatgtcaaacattgagttatgcttacattactctaggtatagttgtgtcctagctttgtacaaggttacaataatggtggtttccttgttttcagcttcattcttgatcatgcctaacattttttgatggttttagcctcggagaacagtctactgctatttctccctttttcctgatcccaacaaatagtttagaaatctttgtcttaactgcaattgggatcatttttcctttagagttgcccacagttagtcatgtccgtcactcttcactcactcaaatgacctcaaaagatttacctgcaatttaagcctttcaccttggcattttctacctggaactctggcgtactctgtgggatcagtgagatccatagtgtgcactccctagcagatcgtgaatgtttgttgataactataattcattgtttagtcttgtctatacagagaagcagtagcaccttgctttagtaggatcctttatgcttttattcattattgaattttatcttcacaataattctgtggttctgcagttgtcattatttcagtttgggagttgaggaaactgagatcgtggcaaatcaacttttcccatttaaatccactatttcatcgctaatccagggttataacccaagactaactgctagtcaaagttgctttctaaaaatcagttacacagacttctaattctcgtgctgtacagtcagtgcagaaattgcaacagaactgttctttgttctgtagcaatgtgtattcaaaaggtaatcatttcttgtgtataaataacattcctccctaagagagatgttgtgggaatttatatcagtcaagaatgtatatcgataattaaacatagctagtctaaaaaacttgaagtgaaagattggttcgtattcaatcaactgaactgtttctttctctgcaatattgtggttcttgacatgattgctgagtttccaatttgacacttctggaggttcgtaaatcaggacacatgctgggtctcagtctgtcatcctgagtcttagcattggttatttatttccctttattacccaacatctatttactgcacaaattagtcgagaagctttccatgacggacctttgtgagaaaaaaaaaatgtgtacattgggtagctcttcaattacaaacatgcacagattgtctgggtttatgtgcatatactttattattatttcacttttgtatgtcagatgaatttggtgtaaatgtaaatctaacaatatgggctctagtggccaaatacattgccataatatgtttttgatctgtcagtctcctgggtgaagtgtcgcaagtgtggtaaaattctgtagtataaattgatgctcagttatggacaattaccaggtctatatgatgtcagactaccacactgatccacttttaggataacagcttcgctctgatgatcttcagattttagatttgctttcattccttgacaaaatgaaatacatttaaaacttctaaaattgtcttttgtatatatttctgcagggtctactcttgggactactataacaatcaattgtactgctttgtttcttttattaaatagcagaatagctgcttgattcgtctgtatgtgctgatgtgtgtctgtgaatctagtccagttcactgtccaataagaatttctgaaatgttctttgtcacatcaatgtacagtcaaaatcgtattgtgtttgtagcagaatgattgcatcttttattattcacagcagccaaaatgacacatatttcacacgtgacaccttttttaaaaaagatgaattgtccaaagttgtatgtagaatatatttcacaaatcaaattccctatttaataaatggtgctgggagaactggctagccatatgcagaagagtgaatttctataaatagaatgcaactgtgtaaatagcatccaaatcaagaaacataatataatatagccagaagctcaggatcccccttcatgtcttctccagtcatgaacatttcacaagggtgactactatccttacttcaaaagttttctattactttttcctgtttttgtgtattatatgaaggaatcgaacagtcatatctacttgtctgtggctgtatttttccccccaacaatatgtttgtgagattcatccatattattgtatgtagttgtggattgttcacttttcttactgaataatattctattgataccacagtgtatttacacatgttgatatagatgagaaattgagtagtttccaacatgaggaaattgctgtcaacaattctgcaatccatagccatgctatcaacagtctagtacatggtttttggtgaatatattaataactatgcatttctgttggatatacacctgggagtggaattacaactcaaataatattcattttaaaaattttatttcgtttttagtcgacaactatattatggggtacattgtgatgtttcaatccatatatatacattgtggaataatcaaatcaggctaatagcatatctatcacctcaaatacttctcatttttgtggtgagaatatttaaaatcctcctttttagctatttggaaatatacaatatgacaatattagctatagttcctgtgctgtgcaaaagaacaccagaacttattcctcctgtctaactggaactttgtacccattgataaacgtctctcatttttccatccacccaccactgcagcttttgatcaccaccataatactctccatttctatgagttcaactttttttaaactgcacatacaaatgagattatatgatatgtgtctctctgtgccaagtttatttcacttaacctaatgtcctccaggctcatccttattattccaaatgacagaatttcctaggtttttaaaattttttttttatttttaattttttggggtacatagtaggtatatatatttacggggtacatgaggtgttttgatataggcatgtaatgtgaaacaagcacatcatggagaatgaggcatccatcctgtcaagcatttatcctttgtgctacaaacaatgtaattgtacttttagttattttttaatgtacaattaaattattattgactatagtccccctgttgcactatcaaatactaggtcttactcattctttctaactattttttgtagccgctaacaatccccacctatcccctacctccacactaccctttgtagcctctggtaaccatccttttattctgtctccatgagttcaatagttttaatttttagatcccacaaataagtgagaacatgcagtgattttcgttctgtgactggcttatttcatttaatgtaatgacctccagttccatccaagatgttgcaaatgacaggatataattcttttttattgctaaatagtaccgcatcatttatatgagccacattttctgtatccattcgcatgttgatggacagttagcttgcttccaaatcttgcctgttgtgaacagtgctacaacaatgtgagagtgcagatagctcttcaatacactccctccttttcttttgagtatgtacccagaagtgggatttctggaacatatggtcattctctttttattattttgagaaacattcatactgtctttatggaggccgttactaattcacaatactaccaatagtggataaggtttccttattctctgtatcctcatgaacacttgttatctttcaactttttgataatagccaatccaaaagatatgaggtgatatctcattgtgattttaatttgcattttttgatgattagagatgttgagtattatacatatatgtgtgtgtatatatatatatatatatatatatatatatatgctgtttgtcatcttttgagaatgtctattcatatatttgcccatttttttattagggttatttgttttcttgttattgagtagcttgagttccttgtatattttggatattagcaccttatctaatgtatgatttgcaaatatcttctcccaatctgtgggttgtctctttattccattaattgtttcctttgctgtgcaaagctttttagtttgatgcaatcttacttacctatttttgtgttgattgtgtttgggggtcatatgcaagaaaccactgcccagaccaatgtcatggagctcttctcttatgtttttgtagtttttagtttcaggtattacatttaaggctttaatccattttgagttgattcttgtataaggggtgagataagggtccagttttattctgtatgtgaacattcagttttcccaataccatttattgaagagactgtcctctccctattgtgtgttcttgctacctttgtcaaaaatcaattgatcaaaggtgtgtaggtttattttagtcctctttgtcttattccattggtctgtttttatgtacttgccatgctgttttgattattatagctttgtaatacattttgaaatccagtagtgacatacttccaattttattctttttagtaaagacagctttggctatccagggtcttttgtggttccatgcaaattttaggattttttaaaaaaaattctataaagaacaatatgcagattttgttagtattgtgtcgaatctttagattgctttatgtttaacaatattaatttttccaatttatgaacacagaaatctttccatttatttgtgtcatcttcaatttctttcgtcagtgtcttatagtttcaacacgcagatctttcactttcttggttaaattcactccaaatattttttcatgctattataagtgagattgtttccttaatttctattttagacagtttgttgttattgtacaaacaataacaattgttatcgctactgatttttgtaagttgattttgtaccctgcaactttactaaacttgtgtatgaattctaacagttttcagtggagtccttaggatttgctgtataagattatgtcatcagcaagaaggggcaattttacttcatccttttcagtttggttgccttttatttctttctcctgcctaattgctctggctaggactcccagtactaagttaaacaagggtggggagagtgggcatctttgtcttgctcctgatcttagagaaaagccttctacgttttactgttgtgcatgatgttagctgtgggcttgtaatttatggcttttattcttttggagaacatttcttctatacctaatttgctaagagtttttctcataaaaggatgttgaattttgtcaaatgctctttctgagtttattaaaatgatcatacggtttttgtacttcattctgttatatgttgaatcacatttattaatttgcatatattgaaacaaccttctatcccagggataaatccctcttggtcatggtgaataatccttctaataaactattaaatatggttcactagtatttcattgagaatttttgcatctaatttcattcgtgatattggcctatagttttctttccttgtagtgtctttgcctggctttgggatcagggtattgctggccttgtaaaataaatttggacgaatcccttcctctttagttttccaaaagagtttgagaaagatttgtgttaggtcttctttaaatgtttgtagaattctcccatgaagccatctggtcttgagctttcctttgatgtgagaacttttaaatactgatgcaatctccttaactctttccttagctgttactggtcttttcagatttccaattttcattattcagttttggtagattatgtatttctaagaattcatccatttctgttaggatgtccaatttcttggtatataattgttcatcgtagtctcttaggatcctttgtatttctgtgttatcagtcataatgtcttctctttgatttctgatttgatttatttgagcctgctctcttcattcttagtctagctaaggatttgtcaattgtgtttagcttttcaaaaaaccaacttttagttttattgactttttttctattgtttctctagtctctatttcatttatttctgctctgatctttgttattttcttctttctgctaactttgggcttaattcattcttctttttgtagtttcctgaggtataatgttaggtatttcatttgagatatttcttcttttttgatgtaggaatttattgatataaacttccctcttagcactgcttttgctacccccagaagtttttctatgttgtgttttcatttctgtttgtctcaagacttttaaaaaatttcctcttgaatttcttcttttgacccaataattgtttaggagcatattgtttagtttccacatatttcttaattttatatgatttctcatgtaattgatttctaattttatattgtggtcagaaaagatacacgatgggttttcttaaatttgttgagacttgtctgtggcctaacatatgatctatcctggagaatgttacatgtgtacttgagaagaatctgtattttcctactgttcagggcacaatgttctgtatatgtctgttaggtccatttggtctaaaatgtcattcaagtccaatgttttcttatgaatttttctgtctattgcttaaagtggaatattgaaattgcctgctattattatgttataggctatgtttcccttcagatcccttaatgtttgctttatatatttaggtgctctgatttgggatgcttatatacttgttatgtcctcttgatgaaataacctttatcaatatataatgatgttctttgtcactttgaacagatttgacctaaagattattttgtctgaagtaagtgtaactaccctgctctctttttgttctcatgtacatggagtatcttttttcatccctttactttcagtctatgcatgtcctttaaggtgaaatgagccacttgtaggcagcacatatttgggtcttgttttttgttgttgtcgttaatccactcaaccactctatgccttttgattggagagtttaatctatttacattcaaaataatgatggatgggtaaggacttactagtgtcattttgttcattgtttcctggttgtcttacagattctttgttcctttcttcctctattgctgtcttcctttgtgttttgatggttttgtgtagtagtatactttgggtcttttgtttttatcattcatgtatgtattataagtttgtgctttgtggatactccgaggcttacataaaacattttataagctgataataacttaaatttgattgtgtgcatatactcaacactttgactctccctcctcccacattttatgtttctaacatcacaacttacttttttttttaattatactttaagttctagggtacatgtgcacaacttgcaggtttgttacatatctatacatgtgccgtgttggtatgctccacccattaacttgtcatttacattaggtatatctcccaatgctatccctcccccgtcccctcaccccacgacaggccccggtgtgtgatgttccccttcctgcgtccaggtgttctcattgttcaattcccacctatgagtgagaacatgcggtgtttggttttctgtccttgtgatagtttgctgagaaagatgatttccagcttcatccatgtccctacaaaggatgtgaactcatccttttttatggttgcatagtattccatggtgtatatgtgccacattttcttaatccagtctatcattgatggacatttggattggttccaggtctttgctattgtgaatagtgcagcaataaacatacctgtgcatgtatctttacagcagcaggatttataatcctttgggtatatacccagtaatgggatagctgggtcaaatggtatttctagttctagatccctgaggaatcgccacactgacttccacaatggttgaactagtttacagtctcactaacagtgtaaagtgttcctatttctccacatcctctccagcacctgttgtttcctgactttttaatgattgccattctaactggtgtgagatggtatctcattgtggttttgatttgcgtttctctgatggccagtgatgatgagcattttttcatgtgtcttttggctgcataaatgtcttcttttgagaagtgtctgttcatatccttcgcccactttttgatggggttgtttgttttttcttgtaagtttgtttgagttctttgtagattctggatattagccctttgtcagatgagtagattgcaaaaattttctcccattctgtaggctgcctgttcactctgatggtagtttcttttgctgtgcagaagctctttagtttcattagatcccatttgtccgttttggcttttgttgccattgcttttggtgttttagacatgaagtccttgcccatgcctacgtcctgaatggtattgcctaggttttcttctagggtttttatggttttaggtctaacattaagtcttcaatccatcttgaattaatttttgtatatggtataaggaagggatccagtttcagctctctacatatggctagccagttttcccagcaccatttattaaatagggaatcctttccccatttcttgtttttgtcaggtttgtcaaagatcagatggttgtagatgtgtggtattatttctgagagctctgttctgttccattggtgtatatctctgttttggtaccagtaccatgctgttttggttaccgtagccttgtagtatagtttgaagtcaggtagcgtgatgcctccagctttgttcttttggctcaggattgtcttggcaatgtgggctcttttttggttccatatgaactttaaagtagttttttccaattctgtgaagaaagtcattggtagcttgatggggatggcattgaatctataaatttccttgggcagtatggccattttcacgatattgattcttcctatccatgagcatggaatgttcttccatttgtttgtgtcctcttttatttccttgagcagtggtttgtagttctccttgaagaggtccttcacatcccttgtaagttgtatttgtaggtattttattctctttgaagcaattgtgaatgagagttcactcatgatttggctctctgtttgtctgttattggtgtataagaatgcttgtgatttttgcacattgattttatatcctgagactttgctgaagttgcttatcagcttaaggagattttgggctgagacgatggggttttctaaatatacaatcatgtcgtctgcaaacagggacaatttgacttcctcttttcctaattgaataccctttatttctttttcctgcctgatcgccctggccagaacttccaacactatgttgaataggagtggtgagagagggcatccctgtcttgtgccagttttcaaagggaatgcttccagttttgcccattcagtatgatattggctgtgggtttgtcataaatagctcttactattttgagatacgtcccatcaatacctaatttatcgagagtttttagcatgaagggctgttgaatttggtcaagggccttttctgcatctattgagataaccatgtggtttttgtcgttggttctgtttatatgctggattacatttattgatttgcgtatgttgaaccagccttgcatcccagggatgaagcccacttgatcatggtggataagctttttgatgtgctgctggattcggtttgccagtattttattgaggatttttgcatcgatgttcatcagggatatttgtctaaaattctctttttttgttgtgtctctgccaggctttggtatcaggatgatgctggcctcataaaatgagttagggaggattccctctttttctattgattggaatagttttagaaggaatgataccagttcctctttgcacctctggtagaattcggctgtgaatccgtctggtcctggactttttttggtttgtaggctattaattattgcctcaatttcagagcctgttattggtctattcagggattcaacttcttcctggtttagtcttgggaaggtgtatgtgtgcaggaatttatccatttcttctagattttctagtttatttgcgtagaggtgtttatagtattctctgatggtagtttgtatttctgtggtgtcggtggtgatatcccctttatcattttttattgcatctatttgattcttctctcttttcttctttattagtcttactagcggtctatcaattctgttgatcttttcaaaaaactggctcctggattcattgatttttttgaagggttttttgtgtctggatcttgtaggtatgcttcattgtttcttattatttttttcttttgtcttctctggctgtgtattttcaaataggctgtctgcctacaagatccagaaaatagcctcaaaagggtcaatctaagagttattggccttaaacaggaggtagagaaagagatagggatagaaagttgatacaaagggacaatatcagagaacttcagaaacagagaaagataccaacattcaagtacgacaaagttatagaacaccaagcagaattatctcagagactacctcaaggcatgcaataatcaaactcccacaggtcaaggataaagaaagaatcctaaaagcagcaagagaaaggaaacaaataacatgcagtggagcttcaatacatctggcagcagatttttcggtggaaatcttaggccccgggcatatccagagatgctgtctgagggccagtcattggagtcaaaaaccttagcagtttacctcatgttctattctattgtggctaagctagcactcacaccacaatataaagtgctccctgctcttccttgcccttttaaaaggcagaggatcctctccctgtggccctcaccaccatgagggttctgcttggcctccactggtgttcacttaaagcccaagggctcttccatcagcttgtggtgaatgctgagagaactgggacccatattttagggccttgggctcccctctggcccaaggcaggaccaaaaatgctgtccaagaacctaggccaggactcagaaatcccagaagcctgcctgcttctctgcctttctgtggctgagctggtacctaaggggcaagacaaagtcccctttacttttctgtctacttttctcaaacagaaggggtctttcaccataaccaccacagctgggaatttgctgggtgacctatgaagccagcacatctcagaggccaagtcccacagtgtactccctgggtattgcaactggttattcaacgttcaaggcctctttagttagtagctgatgaatcctgataggactgagtccttccctttaaggtagcagattcccttttggcccagggtgtgtctagaaatgctatccaggaactagggcctggaatgggggcctcatgactctgcccatgccccatcctactgtggctgagctggtatccaagatgcaagacaaagtcttctttacttttcgctctcttctccttaacgagaagtaaggagtcacttctgttgctgcaagcttcactgctgggagtaggggaggtatggtgcaaccactcccttagccatgccagctggtgtctccctaggtcatgtgggagaccctaatccactggcttcaatatatagagggacgtttctaaattatttatctgtaatttgattaagaagatagacacaggcaataggatatgccaacagattctctctaacctatagttattttaagaaagttagggaaagagaggtcattgattagttttggcttactgaattatttgaccctcccatatcttttaatttatggattttatataaggcacagatattctactagtaaacatgacattaaagatgttttatacaaatgaatgtggttgatacaaaggcattaaataagaaacaaaggaaattcagaggacatttgttcgcctggaatagagatcattagcataagcataagaggaaaataaggaaggaaatgggaaagtcttgagtccattttcaaattatgaaaacttgaaatgcaacaaacaaatagtggttacttaagaagaaagactgaagatgctgggcaaaggttaactttagaaatggcatttttatatcattataaagagaaagtggggataatggaaataatctacatgtacaactcatttgacagacatttattgaaggtattccaaatgccaaacactagtttgtgcactaaggatgtttttaatttttactttttactttatttttattttctagcttcttccgctttgccagagaaggatttttttaaatggataaaatactaacttaggctagcttctttcagaaacagacctttaaacaatgattaatggtgaaagtggtttggttgtaatgtgatcccaggaagtaccagtaggagagtgggacaatgagataataaatgaaagaagccaataattaagccagttatggaactagttattgctttgggccactggggtttgatcctgatgaaggagctctgggagatagtaaacaaacaaacaaacaaaaaacatgcctcaaagttgtcaaccacaagggggtaaaggcaaggaaccagggctaactattccaactcttatccatcattggctaaatgcttcctggtacataaactttccagcacttctggccagcgcacctagcaagctgaggaaaatctctcaggtttgcagtagggcaaatgcttgtactaggacactgctggcatatacttgaaggatgagtgccaacggcagatagatgggccctgacagcatcttctacagattctgtccttgcctttgaggcaaggacactgtctagagtcagagacagaaatgtaaaatgtaaaaatgtaaatcatagtagcacacagtacaagttttaaaatcttaacaaagtgttatgggagaaccacggtgagagaaaatgactgcacatatgagagcaggggaagtctttatatgtgatgatgacatttgagtgggtgttccgttatcaaagatctacttaaaagggaaaaagagtagaattattttaaaccatggatgtaaccaggcgtggccaccctatatgtgaatgtcctgggataattttgtccccagatgtctctctttttgagtgtcattttcatttatgtattcataatataaagaaattgaatagaaagaggtaaacattggtggcaaaaatcccttcctacccataaggctcacagaataatgttgtctaaatgccataacatttttggtaagttttggttctatgggctttggaaattttttatgtaggaactcctccaaggtgatataagcattcagtgtatttatctagataccctagttaaagctactttaagcaggatcaaagtcctcttttaaacttttgtatttgaaagctattcccatgtacaattcccatgattcttgtacaattcctaggagacctttgtttacatcaaaagagtttgtctctctctataagttagaacttgtacattgtagtaatggaaaatccatttcaaagtagcttagacttactcagacaaaatgtattgatcagtgtcattaaacagttgaaagatagacgaggcttgattcaggaattaaatagcatgaccagattctagttttccttctccattgcatggctctgctccccagtatttgttccgtttaattcctcttaattgttctaagatggatatcaggatactgcagaactacgtgctttctcatccatcttaaacaagaagcaatgggttttctcttttagaatcacgaacaacaacaacaacaacaaaaatcctagagttgtttcattggttctgattgaccttacttggaaccataagtccatctttgaattaaccactaaagccagggagatgagttaaaactaagtacacaccatccacagagcaaagagaggtctattgtgggaaaactgcacaaatggaaaaataacaggggaaacacaggagaaggaggtagttagttaatgttcaatacacgcaccttctcagggacttttcttccatctggcatcatctttgtcttttgaccattttccccaatcaatacctatattcatactcaagttttccatatttgggaaaaaacttctcttgacaccaaactcccctctgacttccttcttataatgatctatggttggatagtctacaatttactgtccttactttttcataggtattttttaatctcctacagtaagatttctaccactgcactgaaatcattttgtgtatggtcttcagggaattccatgtggccaaagccaatggatacttttggcatgggctttggaggtctaacttcttgaatccaagtgtcggctctaacaatcactatctatgtgaccttagaccagttatttaacgctgtctttatttcctcatttgttaaatgaggataattgcagcaatagaaaaagaacgtaaacaattatacttataggattgtatgatgattaagtgattaatgcaaggaaagaacaacacagagcttcagacagtgtagatattcaaataaatgttagttatgatttttattatgtcttgtgacatctatgagatttgaaagtgttaatcactcttgtgtttttgaaaatctttcttttccatgttctataaaagtacactttcttgatattcctcctccttctctagtctttcattcatcttatttgctctttgtgttttatttattctttttacgttgtattttccaggagtccattcccagcccggtgttgggctcagtctatgtgccatataaatgagaatgcacttgcatttgaggctttgctttttatttctctgtagtgacggccaatcccagatttctgtctctcccaaaatacacagctatgctatagatccttcagtcctcctgactaaaatgttagttttatgtgtgtgttcctcacaacctcccagtgaataggtccaaaactgaactcattatcttctccatgctcactctgcattctttggataggcagtgaatagcaccactatctaacaggcacctaaaccagaagccaggtaatctgtcttaaacccttttgttttccaagttcttatcataatggctggtgtctaacagatggtaaataaaatagagactagctggctacatggatggatgtgtggggatgcacagagggatagatggattattgagtgagtctctagcctataaatatttttaattaactaataaattatgataatgtacagttgaaggtcaagggtgaaaaagcataccctcagtgggatgcacaccccaaggagccattttaacttgctacataacacacatatgaccacttttttgctgaaagccttctattattgagcaagcattcaaatcccatgtttgcctgaaataatggttcaggttataaaagtttccttctttttccaggattaaaattatcttcctacataataggaagaactgctttatcttttcctaatatctagagatggccttttaaaaatatagactgttttccctattgaaatgaactgtaggatgtacaaaatatttactggcatgaatcaaaagagcttgctatgtttatgtgaaaaccactaggcattctaaaaaatattgctagcatagtaaaatgttagtaattaagactaacgaaagcgaaggcaaattggaatcagagactatttttaaggaatgtcaactgtattattttcaaatacacatggtacataacagtaggatatgagaaaaagtcccaagtatgtgtactaaagtagcctgctatgataagttgaaaaagggtttgtaattggaatatccacagaatatttcagaacacttaaagacattttcatttacactttatacagctttcttataagagcatttacaccatttattttataaaccaaagattaattagaagactaaacaattacaaggcctcaactacgaaagctgttccactacctagtggaacaacaacaatgagacacacaaaacaatggcgttcaaagattagagagagacttacggttaaacagaggttgacatgttaactgaagttgcaatataatatgtcgactagttttgcaatacatagcaaacacccaaacagaaataaacctgataaaaaaacagtagtctataatgtgtgccacttactgagttttaattattctggggactatatttttgatttcatgttacaatcactagttttgtggggtctttctagtcctgatgcttatttacaaaatatctgaagtatttctttctatgtatttatttttgagatggagttttgctctgtcacccaggctggagtgcagcggcatgatctcggctcactgcaacctctgcctcccgggttcaagtgattctcctgcctcagcctcctgagtagctgggattacaggcgtgtgctaatttttgtatttttagtagagactgggtttcagcatgtcggtcaggctggtctcgaactcctgacctcatgatccacccgctttggcctcccagagacctgggattacaggcgtgagccaccgcacctggccatctcaagtatttctttaacttataacttcacataactttgtggaggcaacagggttaattaaaaaggactttacttacataacaaaataagaagcatagttttatattcctgtgccatatacattttgtttgtccatctgtagccattctttgaccttctctcccttgctctttattctgggaggctgacctctgtcatcattgggctcccatgccctttggcttccagttggtttaggcacccaagagccctagaaggaaattgaagacaggaggtaaagtgaggtcaagatatttattctcctaattccctccctttgaggttgccacaggctgactatgtcctttgacaaaaggttattgctcttctcagggtggtttctcattccaattctctgcttttggccacttttccctcccctcatcccttgggcctagatgtagtaacagctctactgttgcaaggttcttgtattatctgtgatggtttcttataccctgcttatcttgtgatttgttgctttgtagataaacctctcagattatctaggcaagatcatagaagaacacgtatgtccagctaagatattccagaagacagtagggaaacattgaagggttttataagagggagtgcagtgatcagatttatgttagttttaatctttaattggggtagaatttacattctaaaacagagatttgggtctgggaggatgatatagagcctcttatggatgtgagggcaaaaaatgatagaggtttgcagtgccaatagaaagaggaaagaagttatatatgagagaaatttgtaactaattatatgaggtgttgggtgacgcttaggaaagaatctagaatgtctatcaggtttcatgcttaagggataaagtagatggcagttttattacttgttttctgtattatttttatttcataaaaccagcttagagaagttgcatagaaaaaataatgtagtcctgtttattttaatatttgaaaagaacatatttcagagtagaatctatatagtacctccctcttggacttccaatgataccagtgatagcctcaatataagccagtcttacaaaatgcacccagcgtgaattcttaggtattgttaaaagaagttggccaggcgcggtggctcacgcctgtaatcccagcactttgggaggccgaggcaggtggatcacctgaggtcaggagtttgagaccagcccggccaacatggtgaaaccctgtctctattaaaaatacaaaaaaaaaaaattagctgggcatgatggcacgtgcctgtagttcctgctactcgggaggctgagacaggaggatagcttgaacccgggaggcggaggttgcagtgagcggagattgcaccattgcactccagcctgggttacaagagcaaaactccatcaaaaaaaaaaaagaaagaaaaagaagaagtttctaatacacttatcttcccttgggttcactcagaagacccttggaaaaggttttaagagcaagtgatttatttggggggtaaattaatcagtagaagagtggaaaaatgagacaggtgaggcaaggcagccagtaaagagtggtgcattatcaagccagctgctgttgtgggtcactggagctttatcccttgggaaactctggaacccttgtaaaatacatgcctcagagttatttcccctagcatcaagggagctagtgtaacaatatcccaattcctacaattagtcattatatacaggctgcctctgggagctggaggggaggcatcagttgcctggtatgtctagcctgtcacatggatggcaaagcaaactcctgtggcaacagaaagccttcaggcaatgaaatgctggcactgggaaatcaggctgatgggtgctgaagtggcaaggatgaggggatatggatattctgctgtagtgcttttctaacagatgattcatatttggttctagggatcaagaattgagttaaaattttatatatatgttgatgttctatgtcaccttcaggaaaataatttaacagaaactaatatttgccatcaaaaaagcaaagaatcctgttgttcatcatcctagccataacacaatgaataattttttaaataagcaacataaatgtgagataacgtttggaagttacatttaaaatgtctcctccagactagcatttactactatatatttatttttccttttattctagttgaaagaattcagaatcagtgggatgaagtacaagaacaccttcagaaccggaggcaacagttgaatgaaatgttaaaggattcaacacaatggctggaagctaaggaagaagctgagcaggtcttaggacaggccagagccaagcttgagtcatggaaggagggtccctatacagtagatgcaatccaaaagaaaatcacagaaaccaaggttagtatcaaagatacctttttaaaataaaatactggttacatttgataaaattataccatagattgtaatttaatgatgtttaatgtaaagttattaacagaaaatcacgttaaagctgaaatgaacagtagactttgtatatttattttcttagagacagagtctcactgtcacccaggctaaagtgcagtggcacaatcatagctcactgagccttgaactctggggctcaagcagtcctcctgcctcagcctccctagtagctgggactactagccaggcgtgtaccaccacgcctggctaattttttaaaaatttttgttttctgtagagatgggttcttgaactcttggcctcaagcaattctccttccttggcctcccaaagcactaggattacaggcatgagttagcatgcctagccagtagacttttgagtcaaggtagagaatagaggaaaattgacagctaatgtcaatgttaaagttaattttgtttagtaatctggatatagttggctggttttctgttgcaccatctttaagatcacttcaaaattggtatacgtatttatgtagttgcatgaagtcaaccattcgggcttaattccttcctagaaaaagtaacaggtctactctttcatatcttatttggaggccctggatcaagaaatgggggtgagtgggtatcaggattggggaggaataaggagtactctcactttctccccccattctcttacctccagcccagctcattcttctcttctttctctttcctctgaaatttcctcaaatatctgtctgcttagtagtctataattcctcaggataaaagaaaaaggaaaaggaagaaaattgcttaataactatgttttatcaagcagcatgcatagtgctttgcatgcgtttaatcccttcaaacttagtatttactagtcagtttgaaaagcccttaaatgttaaacaatggttaagctttagggtattttgagcagggaagtaacatggtaggaggttgatcagattgggcacttgatcaaaaccctctatagatattttatctgacagaaaaggccttttgctaaaccagtatctgattctcaaattggttatgtcatctaagaaggaaaccgtatcattttcttggatgaaatggcttccatttccaaattagtcaggttaggctatgctaagctatagtaagaaatgaactctgaaatctcaatagcttaacacaataaagactgctttcttggttatatcatagtccagtagaggttgacaagccattcttaggagctgtcccccaacatggtcacttggaaacccagacttttccaattttgtgacacttgtcattttcaacacactgccaaaagccactgcagaaaaggaagacagaatgtggtcagtcaatccatggtgttttatggccaggcctggaaattatgtatatcacttccaccacatcccatcacacagaacttgttctcgattgaatttcaggaagagttaatggaattagtgagcttttagccaatctctgtcatagccattttatcgaagggacctgagctgctatgaggacaaggttttagtttatatgatgaggatgttagaaagccacatagaattttacagtcttatcattagctctgttggagtcaaaatctaggtgaataaaaattctttcaagagacacatgttaccactaatggttttttcaatggatgagcatagatgaattaggaatctccaatggtcattttcctaattcctggtctgactatgtaatatatagaatcatgtggttattcttgaaagctctagtcatattcgtgaggtagtcagcatgttatgctacttctttttcttctctataagtttcggatactatgaatctattggatcacaaaccaaagtagttaactggtaagaaggtataagcagaaaatacgaagtttggactggatccttgagttagatgagaagaaggagagatgagaggcatacagtgatagatttgactagggcaagaggactctggtagttagcaaatgagaaataaatttaacctaagaaaatcctaaagtgatggtaagaatggttagggtttaattgctcttagaagagcaagtagctttaaataagagacaaaaatatctgcagaaggaaatatgaaagtagaaaacaaaacaattgcattgtcaaaacatgtaagatgttttaatcacctaaaataaaaccagaattgtattataattgctatcctttgtcaaacttttgaaattaaaaaaaaaaaacgctttggaatggtctaaaactacatcataaaaatggctcagccactatctatagagattgacattttttgtttgtgctctgtgtttaggaatttaatgatgtgtattgctgcagattcaatgtaagttcccgatacagataaagatggccaaagctgtaattttttcatccatttcttgaatgatgtatgctaaaattaaagtaatcctaatgttaataataacttttagtgaatgcttgctgtgtgtcaaaaagtatgctagtcactttatatatattggtttatttcatcctttcaaaaacactctttgaaaagtactcttattattcttagtttgcagagaagaaaactgaaggctagagaagttcagaatcttcttttgaaagtagtagagttgtgatgcgaatgcatagcaattactcttgtagatgacctcacaggcttcctcttccaattgtctacgtggctaaaacaaagcaagaaaaccccataagaatctgaaaaagactcatgtaattattaattgacaaataagattatattacattactgataaaccaacaggtagaaaatgaaagcaatgaaatagtatactgcgaaaaaaaatttcatattatattctttgatgaaaaaataaaacaataattgcaaactgcatttcatttttaatgaaacgacaatgtttaattcttctaaaaggtagggagcaaataaaatggttatctggtctttacatcgaatgtgtcatcactactaagtgatattagctggcttattacttaaaattttcttttaggaaaaaagtgtgaaaatagacaggaggagacattaaatggctaaagcaacacccccttgctccgtaagttctttctgagtctgtgtgcctaagattaacaagagagcctgtgagcctcacaaggcaatcacaaagctatgtctacagccttggagagctgtgattacagcagccagcctcctttgcagcacctcagtgatgactacactaactctcactactgagcaacaatgaaatgtttcaaacccaaccaccaacactgttataactcttaaaatttgagccagtcaccatacctgaacgtaaaaagaaaattaccaaaaatgcttgataccaaaaagcaattaatgattcataattgctaatctttattgacagtctcttctagttcttatctacatatattttaattgtctacataatgtaaattaaattttaaattctgatttgtaaacttaatattgcataaatatttatcaatgttgttaaacatcttttaataattattttaacttctttatattatttcattaatttccatctttatgtccttgctggtctgacatttagaaaaaactcctccttttatttagaaaaaaagaatggtgaggccgggcgcggtggctcatacctgtaatcccagcactttgggaggccgaggcaggcagatcacgagatcaggagtttgagaccggcctgaccaacatggtgaaaccctgtctctactaaaaatacaaaaactagcctggcgtggtgctgcatgcctgtagtcccagctacttgggaggctgaggcaggggaatcgcttgaacccgggaggcggaggttgcagtgagccaagatcacgccactgcactccagcctgggtgacagagcaagactctgtctcaaaaatacataaataaggagaataaatggggacaataacaacctattcacagaacagaaataaaaccggagatgtcatgtggaaaaagcttatcttgaaagcgtggtcagagtggaaagaaacagcaacaggagagtcttgatttggtgaaaaaacagaatgcagatggcatagagtatcaacaattaattagcaggccatcaagagacggccataacatattggtaattgttttctttcacccttaattttttctaaaacaaaaacatgaagttagaaagtagttaattttgttagccacatggcttcatggtttaattttatcttctctatgggcctggtacaacaataaagttcttttgagatagaaagacagatgttaggcaaaaacatacaagattttcattctaatcaaaatctttgccaataggctatgacagaatcctatgagagatgatgccatttagaactttcacaagaggcaaaaatagtatgccattggcacctaaaactgccaacagtgatcatcataggatttatttcatttggcggattcttggttgagttcataacctgttccctaggcttttaagattggtccaaacttggcaatggattctttggaaaaattatttcttgatcgttttaaactttcttttccagtgtcaagagagattttcccaggctccgagttttcatttattttttcccctgtcagtttttgaaagagaaatcccctttttgtcggctttgtgattgcttttgtgtcaaattcagcgtaaaagcttttcaaacgtgacagcattagctgttttgtgcttggctgagctaagagtacatgaattcaatagagaagtgaaatcttgtttgagcctggctgatttggctatataatattgaaaactatctgaagcaagaaattcaatacttttcaaattattgaataaacatttctaaggctgcaaaatctctgtgtttttgaaggcattctttaggaaacttgaaacacagacattctataatcacataattaattttaaaagttgaacttattgtatgtagtaactaaggcagctatttgagtgtctcaaattattttactaaaaagggagacatttttcaaatatggaagtagtgccttacatttttagttatctgtggaaggatcgatggcatcatatatctcatccaccataaaaatatgtacggtagtggaaactgaatttttcttttatatattttgtgtattttttggagttgtacaaaattaaatcagcaaattgacccacactagtagtttgaggtttgggtttctggtacaataatgaaaagcattattagaaatcttcttgccaggacctaccatttcttcatgtattttctttattcccttttgttctcccctaaagcttctatgtgattaaagagaaaagatcaataacccaatagtacttttccttctaaagtatgcatgaaactcttaaagttctcaaagcatacaaacagagtgctctctacattgctgatagaacacaggtagtaatgggctagtttccccaggtaactattatattatataaatatttaatgcagagtcaccaagccttgaataactttatgctttgattgtaccatattttctctagtttgcttttcacaatttaacttatcccgtgcttgaaaatataatgtggtaactgtgtaaatctgctcctcaaaaaattttcgaaatcatcttttcttttttcttttctttctttttttcctttttttgagatggagtctcactctgtcacccaggctggagtgcagtggcatgatcttggcttagtgcaacctccacctcctgtgatcaagtgagtctctcagcatcccaagtagatggaactacaggcacattccaccacgcccaactatttctcgtgtttttagtagagacagggtttcactatgttggccaggctggtctcaaactcctgacctcgagtgttccgcccacttcagcctcccaaagtgctgggatacaggcgtgagccaacatgcctggccccacatcgccttttctgaaccctgggaattaaccaaaggctggcaacaatttttgaaatgctgactctcaataaaaatggcaaagtttgaggttttttaagttggcctttcccgtcactttctcccagctccacagtagccttgaaaatcagtagccttgcaaccataatagctgtgaaaactagcagccttttagccaccagagagtgtagaccaggattggaattcttcaaaaaggccaattttattccaagaaccttgccactgtttgacctatcttgcagctccctggaataaacctatatacatggccttgcctttatttggcccgacttagagataactttctaggaaaagccctagctccagggtgttggtccaaaccaattagcagcaattctttaacataacaggttcctaaggctgtgatgctagttgagataaacataggtctggagaaaaacttccagtgaagctctggagaatgaggtgtccataggggattttggcaacctctgacatgttcttgcgggatctagaagcccatgtgcttgtcttaacaaatagagagtatcaataaagagatagaaattgtaaataagaactcagtggaatatctggagttggaaagcacaataactaaaattaaattttcacttgacgtcagattcaagctgcaaaagaaagaatcagcaaacttgaaaataggtaaatgggataatccaatccaaagaaaagaaagaaaaaatattaaggaaatacagaaagcaaaaactgactgaactgaaagaagaattaggtaattcaacaaaaatagttggagacttcaacatctcacttttaataacaggtaaaagaactaggcaaattaacaaggaaatagacacttgaaaaagactataaagactataaacttacaagacctaacagatatctatacagcgtttcatccaataatagcagaatactcattcttttcaactgtacacgaaatattctctagggtaggccatatgctaggtcataaaataagtctcactacattcaaagggattaaaatcatacaatgcagattttatgaccataatggagtacaattaaaaatcagtaacagatgtaaatttgggagttcataaatatgagaaaattatacaacacactcttaaatagccaatgggacaaagaagaaataagaaaatacaaaaatatcttgagataaatggaaataaaaatacaatataccaaaacttatgggaggaggctgaagcagtgcttagagtaaaatgtataactataaatacctatatttaaaaaggaaaaagatctgaaatcagtagcctaagcttctaccttaagaaactagaaaaagaagagaaaagtaaatctacagtaagcagcaggaagtaataacaattagtgtgaaaaaaatcagatagaggaagaaaatataatagaaaaaatcaacaaaaccaaaatctagaaatttagttatttgaaaaggtcaacaaaattgacaaagttttagctgattggttaggaaagaaatggtcaaattactaatattagagaaaaagagggtgcattactaccaacattacagaaataaaaagaagtaaaagaggatattatgaacaactaaacaaatagataacctggatagacctataacaagaaattgaattggtattaaaaacttctcccaatgaaaggctcaggcccagaagtcttcccccgatgaattctaccaaacatataaacaactcttccaaaaaatagaagagaaaggaacacttcctaaccagacaaagatatcacaagaaaacaagctacagagcaatatgccttatgaatatagacttgaaacgcctcaaaaaattatcaaacctaatacaacaacatattaacatgattgctaccataaccaggtaagatttatcacaggaatgtaaggttggtttaacatccaaaatttaatcaatgtattataccatatcaatagaataaaggacaaaaatcgtatggtcatcacaataaatatagaaaattcatgtgacaaagtacaaaaccctttcaagcttgaaaaataaagaacacttaacaaatgaagaatagaaggtattggccaggtgtggtggctcacgcctgtaatcccagcactttgggaggccgaggcagttggatcacgaggtcaggagattgagaccatcctggctaacacggtaaaaccccgtctctgctaaaaatacaaaaaattagctgggcacggtggcgggcgcctgtagtcccagctactcaggaggctgaggcaggagaatggcgcgaaccctggaggcagagtttgcagtgagccgagacagcagcactgcagtccggcctgggcgaaagagcgagactccgtctaaaaaaaaaaaaaaaaagaaggttttgtggattgaatagtgtcccccgctcccaaaagacatactaaaagcctgagcccaggtatctgcaaatgtgaccttatgtagaaatagagtctttgcagatgcagtcaagttaagatggtatttttataagaagaggaaaagaggcatacacagagagaagaatgccacataaaggcactgaccacgggaaaaacaccatgtgatgttacagttagagattaaagtgctacagttgcaagacaagtaaaactaatgattaacggccatcattagaagcaaggaagaggcaaggaaaaattctcccctacaggtttcagcaggagtatgggcctgctggaatcttgattttggatctagcctccagaagtctgagacaatgagttttgtctacccagctacgcaaattgtgacacttaattacagaagcccgaggaaacgaatacagaagaggatttcctcaacctgataaaaggcagctacaaaaattccacagctaatgttattgtgaaacactgaatgctttcccctaagatcaggaaatagtgaaggatgcctggtctcaccacttctattcagtattgtactggaagttcaggccagggaaattaggcaagaaaaataaataaaagacatccagattagaaaggaataagtaaaattatctctacttgcagacaacatgaccttgtaattagaaaattttgaagaatctatgaaaaaatattagaaataataaaataattcagcaaatttgtaggatacaagatcaatatacaaaatgaattattttatacattaaaaatgaataatctaaaagtgaaattaagaaaatatttacaatggcatcaaaaaatgttaaaaacttaggaataaaagagatgcaaggcttgtatactgaagaatacaaagcagtgttgaaagaaattaaagataaaaaaatagaaaaatatcacatgttctcagatcaaaagacttaatattattaagatatcaatatccccccaattgatctacagactctatggaatcattatcaaaatcacaactggcttttttttttttttcagaaattgacaagtggatcctaccatttctattgaaatgcaagggatgtagaatagtcaaaacaaccttgaaaaaagaacaacattggaggagttaactttccaatttcaaaaactactacaaagctacaattattaagtcaatgtggtactagaatgtgaatagacatatagatcaatgaaatagaattgaaagttcaaaagtaaacctttgcatttatggtcaactgatttttgacaagggtaccaagagaattcaatggaaaaagaatagtctttcacaacctggtgctagaataactggatatacacatgaaaaataatgaaatttggccccacctcacaccatacacaaaaattagcttaaatgtatcataaaagaaaacaaataatctgattaaaatgggcaaaacacttaaacatttctcaaaagaagatgtacaaatagctaacgggtttgtgaaaaatgctcaacatcactaatcattggggaaatgcatattacaatcgcagtgagatgtcaccttacacctgttagaatggctgttataaaaagagaagaatgataacaagtgttgatcaaggatatggaaaaaaggtaacacttgtatatcattggtgggaatgtatattagtacaaccattatggagaacagtatggtagctcctcaaaaaactgaaaacagaattaccataggatccagcaatcccacttccgggtatatatccaaaagaatttaaaccagtatgtcaaagagatatcttcactcctgtgtttattgcagcattagtcacaaaagccatgatatggaatcaacctaagtttccatcagtggatgaatggataaagaaaatgtggtacatatacacaatggagtattattcagccttaaataaagaatatccttttgtttatgacagcgtggatgaacctggaggacattatactaaatgaaataagccaggcacagaaagtcaaatactgcgtgatctcacttatgtgtggaatctaaaaaagtcaaactcattgaagtagagagtagaatggtggttaccagaggctgtggatttaggggtggaaaatggggagatgttgatcaaaaggggttaaaaactttagtcaggaggaataagtttttgagactttatgacacaacctggtgaccatagttaataatattatattgtatatttcaaaattgctaaaataacagattttaaatgttcttgctataaaatatgataaatatatgcagtgatagatacgttaaattgctcgatataatcattccacagtgtatacatatatcagaacatacatgtaccccataaatgtatataattatttgtcaaagcaaaataaaattaaaaataaaatgttttaaaacttttgtaaaataaactttataataataatatatttttaatgaatcatagagctaaatatattaataagaactaaaactttaaaactcttctaagaaaatgtaggaatacaatggattatgcagtgttttcttagatatgacaccaaaagcaaaagtaaccgaaaaatacacaatttggactttaacaaaattaaaacttttgtactgcaagcaatattgtaaagaaagggaaaagacaatcctcagaatgggtaaaaatatttgtaaatcatatatttgataagatacttgtatcaagaatatataaaaactcataattcaacaacaaaaaggataaatgacttaattacaagtgaagaaacagtttgaataggcatttctccaaagtagatgtatagatctccataagcacatgaaaagatggttaacatcattgattgtttaaaaaatgcaaatgaaaaccacaaggagatagtactttttacccactaggatggctaatacaaaaaatacagacaataacaagtgttgagaagatgaagaatgcttggaattttcacattactggtggaaatgtaaaatggtgaaacaactttgaaaacagtttggaagttcctggaaatatttttttaatttttaatttttgtgggtacacagtaggtatatatatttatgggatacaggaaatattttgatataggcatacaatgtgtaacagtcacattggggtacctggcctatccctcacctcaagcaattatcttttctgttacaaacgacaatctaataataatcagttatttttaaattcacaataaattttttgactgtagtcatcctcttgtgctatcaaatactagatcttattcattctatcaaactatatttttgtattataaatttcactacccattagccatccccccctttccccctaccactacccttcccagtctcctggaaatattaaacatgaagctaccatatgacaaaaccattctactcccaggtgtatgctgaacagaaataaaaatacatatgtacacagaaaacctttatacagatgttcatagcagcattatttataatagccaaaaagtagaaccaacccaaatgtccatcagctaatgaataaattttaaaatgtcctctacatccaaaaatggaatattatttagcaataaaaagaaatgaaatactgatatgcactgtaacatgagtgaacctcaaaaatatgctaagtgatggaatccagtcacaaaagaccccaaattgtatcaatacattcatataaaacatccagtaaagactgaaggaggaggagaatagacaatagaaagggactgttaattggtatgggtttcattgggggcaaataaaatgttctcaaattagatcataataatggttgcacaaccctgaatacattaagaaccagaaaattatgcactttaagtgggagaattttatggtatgttaaaaagtatatctgcatgtcattgactacagatcttttcttattttttcaagttttatgaacacagttttagaaacatagtctccatttttctctttcatgaagctgcttgccagctatagaaatgaaaaaatagccatgtctgtggaacataactgctacctagatgggagcctccatcacacaatggatagggagctattttcttttatggtcaagataggcaggttctgtcctatagaatatattctgagatgttacctgtagttcagaaaaacagggatattgttgttctaaacatttcctcaacatttatgtggcttcctatttattaataagagaacctgttctttatgtgtcattatactagtttattctagccctggtcctggtccaggactgtctggaggtattagaattgccctactctatgtgaaataaggtcatatctgaataggtatgtcagtcagcataggctaagctacagtaataagcaacctcaaatctagaggcttaatagtctatattttactcatgttacatgttcgttgtagactgatgagagcattctacttagcttagtcactcggggaccatggctgatggtatctccatcttggtacattctttcatgatcatagaggcaaggaacatggttcttgagccttctgcctggaagtgaccagtagacaaaaccagtcacatggccattcctgagttcaatgggaatgccgatgtataatcttctggcgtgaaaaggcactggatatttgagaacaataatgcagtctaccacaatatgctcatggggtctgaaaaggagctgaaaaaacgccattttctggggttctgtcctctggcattgtttctggaatcgtttccacccatccatttctacaccctctcaactgacttttctcagatgcctggggtagctgggtgatttgttaattacagtattgcttaagccttttaataaagtcagcaaattaaagagagagcccagataaagagaatgctttcaaaaatgtcataatgaaattaaggtaacgaagcacttggagacctctcctcccttctttttgtatgaaacttattccaaagcagctggaagagaaatggggcctgaaagtaaagaggggaaaaatatattgtatgccattagtttaattataaaaattcattacatgaagccatgtaagacagaaaataatggaactctaatgggttggccgataacacatttactagtctgctctcagcttgtagtcattgttgaaaggacagaaaagtaacgacgttggtatgtagtcttcaaagctattgtaaagattaatcattttcagtaagccggaaaatgagggccattttcttaaatagtatgccctgtatagagtgttaccttctgaaacagagttgtttggtaatgtcagaggtttaatagatgagtcttgaagttaatggtgagaggctttacttttgaaatggctttcttacagctattttaacatttctattataaatccataaagaggttttataggtcgttttaattcacacaaggagggaagaaattgtgcttctcttttcccaataaggatttatagaacattaattcattcttgggaccaaattgtttagtgattttcaaaaataaactatgtatttttctgctgtctttttttcagaaatgccttactttattatacataataattttccagtcatgctataatcatcaagattgttttatattcttcaaagctcagttaaaataaacccagtccttttccttaaatttctttatatggatgcataacttctttaactgaattgaaatgaaacctgaattgagagtccagaaacctgcatttttatgatgactctttcactgactagctatgtcaccttgaacaagtcacttaacctttcagagcatttatattctcatgtggacaattatggaattgctcaaaaaggaagaagatatcaaaagatgaaagtgaatatgtaggtaggggtcatatattcgagggccttgtaatccaaagagagaggttaggactttgtcttgcaggtaatagcaaaccattgaaaggttttacacagaggagaaatgaggttctatttgcattacaaaaagatcatttacgcagttgtatgtaggtggaagggtggtttgagagtggagggagggagccaataaaaaagattattttagtacctgagcaagagatgatagggacgtaaattaaggtagtgtcaatggaagtagaagatttggataaaagttaaaaaaaaaaaaaaaaaaacttatgatacaactacccagggagtatgttccctgcctcctgctccagttgaggaccaacatatcagattgatccagagacagaattttggagaacattaatatttaaaggacaggcaaaaaaaaaaaaaaaaaagcttgaacactcagagaatacagaggcgaccaaaagagtggaagccaagaaagcagagaacttcgagaagagaatagtcagcagcaccagttgctgcaaataaatcaagtaaataagaacttaaatctttccataggcattggcttttggtaactgaatcagttaactattttcacaaatgtgagtggcatatagcaataagcccatattgcctttcatgaattttcagcttgggtggggtggcacttcttcatgttgcaggttgattggggtcgctctgctccatatgtcactcattctcctcctgagatgagtaggctagtccagagcatgtttgtcttaaggtaatggtgaagtgcaaaagggatagccacactgcataaatacatttcaagcctctgcttgtgttacttctagtaatatcccactgggattaggcaaagcaaggcgcatgaccaagctcaatgtcaagggcatgctgtctttcgtaggaagaatttcagagttacttagcaaagggcatggatacagggagaggtaaagaattggggccagtaattcaatttgccatagtgacttctgtcagaatagttttagtggaacgatgatggcagaagcctgattttcatgaattggagagtggcacgaatgtagtcaagttgagataatgagtgaatatctgccttctaaagagtgtgactgtgaaaggaaagaaaatgatagagtgcagattattgttgttgttgttgtttaaagatgagagagacactcatgtttgaagtctctagagaaggtccccgcagagaggcaagaagttggaacacacaaagagagagggagtatgtggaggaggatcccagaatagatgggtgcccagatggtgaaatcaacttccaatagcagaaaagtcgcctcttcctctgagactagagagaaggatgcaagatgtaaagtctgatatttcatgaaatgtatgtttgatatattaaatttccccctgtggaattgtaggtaggatcatttactgtgagatttctttcagttcgtgttgtcaggaattagtctgtaaaccacattcgatatttcaaacagaggaaattcaatacagaggactggctcctccataggaatgaaggagctgacaaacccaacagaggacagtgaggcaacccagagtttagcaacttcaggaaactattaccacctcaagggctggggaaccgacaagttttaccaaagcccagaaaccagaaccatcgggtgctaattcacccaatgtaaggtctgcacagcaggtaatggaattacagagggagcagccgtccagtgggaaacggagacaaaggagatactgccaagacagagagagaagggggataattatcttgtttcaccctttctcatgctcttctgtctcccactagtgtgtctcatgacttaacctagttagaagccagctagcaagaaatcccaggaaattctgacctcctatgggagttagtacatctcaatactgagtggagtaggaaatgggtagagaatggatctaagagcaaacgacctcttggtggttagctaacagagttaaatttttccatgaatcccttggttcatgaatgtaaatacaggatccaaggaaaaataacaaatccaacatgtagaactttttgttcataagcatattaggatcctgttttacaattttccgagcaattgcttgattttgacacttcaggacaagccggaggcatggtcagagcaagtaaccccatcctagtttacagatgacaaaactgggacttacaaggttaatgacttccttaagatcaaactgcagaacaatggacaagcaaaacttcctgggaagatgtcctttcgttactctgcactgcctttcttgaagttcctttgagacacagtcattaaaaatttaagtaatagttcacccggaacaaacatttattttacttgtaggtgaatatcacaaaacacattttaaaaggaaatttaaccaatattcaaccttaaaattttaatgatagagctatgcacttgcttttatcttccaagttaaagggagaattttagagttgcagcatttctagacaatgtccataaaacagcgagctacttgctttgcattcagaaggggctcacactgtggggaatatagtttgactcattaaaattagtagtagatgtgctagcagtagtaatgatgatgatgatgctgatgctgatgatgattaatatttatttaatccttcgggcacgccaggcacctttgtaaatgttctccctgaattctctaagttaacccacctaatcatatttccacataaatactgttaatattcccatttagcaaaggaggaaactgaggcacagaaaagataattaactctcccatttgccactaagcgatcacgccaggattcaaacccagcaggctcattgtattgctcaggcttttagctactctttctcttcctcctctcttttctaccatgtagggtcaatatcactaaaataagttcttacacataaaagaaatgagagaagacaaacaattaaagtagaaaaaaatactcaaaattcttgaaattaattcaggttgtctcatagtccacaatcactttttctacctaagatactgtgaatatatatcaagcacatagtgcagtagcagcataatgggtttgaatgtgaaacatttctttcctggttggggaaacaatcttttggggatttagcattttatattcttcatagaaaacacacacacatacacacacacacacatacacacacacacatatacaaaggcaatctttttttataagctagtgctcacagtattttaaatttcttcacacaccatgatcaccacacaagcaattccctgtggtgtacaccattgtcaatggaattcagaaagagaaaagggtgtgtgtgaagtctgttgtatttttgaatttacactccttctgaggtctggagttatcccagtagtaaatttcacagcagtaggcaaagctggtcaaggtcatggttcctagtgtgaatgacacttgggtaaaacccaaggtgggcgggcagaatattaccgtaggagaaagggaaaacattctgtgtggggaatgtctttaagaagggagaaaaaaaaaaaaggctacctttgagaacctttgtgtttatataagggcctgagccccctcaatgtcagtcaaggtcagtgggagttttactttttaatcctacatcctcacaaaacctgggcagtattcagtgagggttagcactcagtcaagatttccttaggtataacagtcctaactttcgctgtgaatacaattttgcagaaaaatatatggcacgcgtatttctacctttcaagcattaaagtacatcaaaaagttctggtttgacgtcaagcctcactctttactaccttgtttagtaggaaatctgtcatttaactctagcttactatttctttcagagattttggaaaattctaggatatgttataatttataattttaggcatttttatgatctattgattatgtttttagattcattggcaccttctgcattttatgttttttaattttaacagctttattgaagtgtaattgatatacaaaaactgcataaaattatatgggctagaacatgtgcatatacccatgaaaccatccaaatggtataacctcttatatctagacttttcaaacaggaacctatgagtgatgggtggcttccaaggttatttaacttgcttgagtaaaataaatgattttaattatatatttactaaaaattttgtttttattttgtattcctgagcttttacatatatgctctgatactggtccatcataagtattttattaacaattcagtgttttataaaaggaattcatttgaaaaaaaggtaaccaagttattggtctcagttttgtggatgttcatgctattaattagcaatttaatagatgagagataataagctcttcttttaaaatgcaaatagcaccctctggatactaagggccaattacatgttctttcgtatcttggaatacatttcttttatcactttaggtttggcttaagtgaggaggagaaagaaagaagtggtaattttgtaccctaggatatttctagaaaaggcaagcctttggcagaagttccctcagaagggctttcaaatagtgcgaggatctgaaaagtggagaatagaaactgtaatgcttgataaaaggagtatggaagaaaaggcaggcattccacgcggataaatgttaattgttttgtaatagcagcaactatgctctgtgcctttagacactgtcctctgctttcatagcaaaagtcagtgatattggcattagcttcttgataatagtttggtaatctgggtctatttgctatatgcagtaaatactattacttggtttgattctaggatgttttagttaactgagaaattacattatatatagattgtatatgttcaataggagttcaccaaacacgctgaaattatgctaagaacactgtttgatttttattctgtaaatatcatactaacgcaaaagaacaaatattaaaacaaaaatgatttttctcctcagaagcattattttcaatttcttccatttcgtgttcagctcatgattatgtattcttagagataaacacagtgtagttaaaaattgtgttctgttttttacacaagaaaattgtgctctttttacagtgattactgtgcacatttgctacatattggaccattggaatgatgtattatgttcttttaatgtccctgcattaaacatcgacattgtttctctttttttttttttttttttttttttttttccgagatggagtctcactctgtcgcccaggctggagtgcagtggcgtgatcttggctcactgcaacttccatctcctgggttcaagcaattctctgcctcagcctcccgagtagctgggattacaggagcctaccagcacacccggctaatttttatatttttagtagagacggtgtttcaccatcttggccagactggtcttgaactcctgacctcgtgatccacccgccttggcctccctaagtgctgggattacaggcatgagccaccgcacccggcctgtttctcatttttttactgctttggttaatgaagattttaagtcatatagtatattgatcttcttttgaagattttatcaggataaagtaccaaaagtgagattattgagtcaatgggaataagcatttgtatgtcacttggtatctattgccaaattgtcctaatagataacggtccccagcagtaatacgtgaatgtgctagttttactggtcttttcagctttggattttattttttgttaatttaattggtgtccaattgtaccttttcaatttaatactctattttttattacttgaaagttaacttttttctttttaaataaaatcatcccactctttctcttgtttgaactacctgttcctattcctgtgtccatttatcaatgacttaacccatcctattgaatttgatataactatcttaacaattagtattatcttaatgcttagaagcctcctctctgcacttgcagaaatgtttaatagaaatttcaggttgatatgcttcgagataaaacctaccattaattgacttctttctttgaaatatgtttcaagtgatgagatagcaagtttgaaaacactgaattgccaaagacaaacaacgaagaaaatgtaggtgatttggtttagtaagattcttatattttgactttttttctaattttaaagtaaggtattctaaaagtattttgatccttcaaaaaattcgtgactagaataacagtactattcttttgttgttcaatattttctgtatgcaggtttagttgaacgccagtagatggcactaattacataaacaattcaacaagttaatgaagagggaaagaaatgtatgaggtttttttcgttcaaatgttgttatatgtcacatattcaacaattatatatgagcttatttttgtagtttttttctcttgtgataaaaacaattaagcccactttattgccaattaattgctactaagttgaaatacttgatactggttattgctcaagatgctgcatttgaaaagtttgtcctgaaaggtgggttaccttatactgtcatgattgactaaatcatatggtaggttaaaagcaatctaatatatgtattctgacctgaggattcagaagctgtttacgaagtattttaagacactccaactagagatttcataaaaaaaactgacattcattctctttctcataaaaatctatagcagttggccaaagacctccgccagtggcagacaaatgtagatgtggcaaatgacttggccctgaaacttctccgggattattctgcagatgataccagaaaagtccacatgataacagagaatatcaatgcctcttggagaagcattcataaaaggtatgaattacattatttctaaaactactgttggctgtaataatggggtggtgaaactggatggaccatgaggatttgtttttccaatccagctaaactggagcttgggagggttcaagacgataaataccaactaaactcacggacttggctcagacttctattttaaaaacgaggaacataagatctcatttgcccgctgtcacaaaagtagtgacataaccaagagattaaacaaaaagcaaaatactgatttatagctagaagagccatttatcagtctactttgataactctatccaaaggaatatctttctatctcatcatggcgcacactgccttacctgttatctgataaataagtcactttgggattcatgatagagttatagctgtacatggtctcatcctagtatctcactccacacacccaatgggaaaatttgtggagggcaatatgactcgtcacttcatttcccattatatatgaatggaaattaacagcgcttatagacagtatctcctcaaactaagccttgtatccttattatacctctcttgatctctagtgcttttttcactagcatttattccaatcataaataaaaatataaattatgtaactaattgttaaatatttgtcctttaaattaatctaaatgccatgagggcagagattttgtctttctcatttgatacatccccaggtcctgaaccacgtgatataatagggagctagtaaatgttttttgaatgatgactccctttgcagaatgtacaattaccttgtgcaagctgaaaaaatagcacctgtacaatatgaggaagaccacggtgaaaaataattgagttccaaaatatgacatcaattactgaaaaaataagctcggtgatttttaacaagaagtaaaagtcaccactggggccaaaacagattttgaactaagagtaggaagtcttaggagaaatgagataatgatatatggaaattaagcggccaactaaattttgaaactgagctagacattagagagtaaaaactcctgtgaagctgaatttaagctggtcaccctggggaatagagcaactctaatcctgaattccagacagtaggtgtatagatggaaaagaccatggaaaagaagattcaacctaaagttgggaagttttaattggagccctatgaaaaagaccctggtggagaaagggcaaacttgaatatggagctgatatttggaaaaattctcatagtaactactttttctcaatggcaaggcttggactttcttctcaaaatacagatcttatatgtgttcaattaaacagggacagattaggttcaggaagaattattcacatggaatcaattggtatcagagagtcaaccattagatcttagtgggaaatatctgcttctcaaagagaagtcttttggggaaagcaaattaaagtcagagattaatttgatgagtttaggtaatataaactaaggggccaagaaaaaagcttgctcatggtatgaaactagagcttgaggacactgatctagtctatctatactactctttctgacagacccctctcttcattctcatgctccttgatggcccaagccactctctcagttttttaaaaaattgttttatcaaggtctctggattcttcatgggaatgacttccagtttatattttttggcttggttccaaaaagctatcagctaaggaatgcatatacttacttcccctatgggtaaagtaaatgagaattttagaagccaactcacatttttagcctgtacagaatctgcaattcaccaagctacttctgactcatgtctataaagttcttccctgttcttttctcacttcacatgtactctttgcaagaattcatccacttgtgtagtttcagtctgttgatgactacccatctataattccagctgagaatgatcttttgagttttagacatgtagatcctgctgctttctttcgatgttaatgtcccacaggaacttcacattgaagaggtccaaagctaaactcatctttgccttcttccaatctctttctccaaatgcaacctacttctgttgtccttgtcttagtccttttcgtgcttccgtaacaaaataccacagactgggtaatttataatgaacagggatttgttggctcatagttctggaggctgcgaagtccaagatcaaggggctggaatctggtaagggccttcttgttgtgtcatgattccatgatggaaggtggaagaccaaaagagagaaaaaatggggccaaacttgtccttatatgaaactcactcccacaataatgatgctaatccgttcatgaaggcagagccttcatgtcctaatcacctcttcaaggtcacatttactactgttgcaatggcaattaaattttaccataagtttgggaagggaaaaacattaaaccatagcattctgcccccttttccccaaaattcttgttcttctcaaagacaaaatacattcatttcatccccaaagccccaaaaatcttatttcagcataaactcaaaagtgcaatctaatataaattagatatgggtgagactcaaggcacaattcatcgtgaggcaaattcccttccatctctgagcctgcaaaatcgaatcaagttcatcccctcaccccctacccttcccagcatcaggtaaccaccaatcacagaaagttttactgatagtcctgctctagatcatctttgtctatgttcactttagctatttatcctagtgttccattattggaatactaagcatgtgggaattatttatattctactgttcaaggtcctcaccaaggtctgattgcaaaaattcaaaaaattgcaaccttaggcataaatgggttaagcagtttagggtacatttataataattatttactgtgctacttcaaaaatcttattgcctctatttataaataaaaagtgttgtctctacacagtggcttgttgtaatgcatttacttgtttctgcctgattttttctatttatacattttcttttttatttttatttttattttttcacttttaagttcaggggtacatgtgcaggtttgttacataggtaaacttgtgtcatgggggtctgttgtacagattatttcatcacctaggtattaatcctggtacccgttagttgactttcctgatcctctcgctcctcccaccctccacactctaatagtccctagcatgtgttgttcccctctacgtgtccatgtgttctcatcatttagctcccacttataaatgagaacatggggtatttggttttttgttcctgtattagtttgataaggacaatggcctccagatccatctatgtccctgcaaaggacatgatctcattctttttttatggctacgtagtattccatggtatttgtgttggtctcaaaaactacaactatgacaggatggcattttcacttttgttgttatattaaactcatcttaaaaaggaaagattaataatgtcaatatttgggttatggagaaaaagtatctcatatctttgaaaaagttctgtaactatagctttttaggtaggagggattctgtggaaagttttctgattacatcatttctcacagttcaggttagacaccattttactatgaaacactaatgcattgcctgcactgagactttcagtcacatggagaaacctaggcaaaatttttgtacacttggaagaatatttaaattagtaataaaatctttagttttaaactgttgaatgttaaataagatataaaatgtacttgaaagaaatttgctttgatatcagacactgccatgttgcagtttcaagacataataaaaaagtaaactaatgtttatattttgctgtttaagtttattaatacatcagatgagtcttcaaattctacagtggcttttgatatgatcatttttacttgccattttatatagaataaatataaataggcatttatgcttaaaaggaactaatctatctatggaaaaaagagaaggctgcttctcaactaaattgtacagtttagaaacccagatctgaacatagattattgttgtgacctatgtaggaaaatatgttgttttccttatcgtagtccttacagagtccatgataacatataaagccagaaatgtgagcctctgcaagttcatttctttgtcttcaatctctgtgaatagatatgagtttgtgaataagataatattagatgtgatattacaaattattgtgagaagcctctaaggattagatttcaaggactgccatctggctgatgactttatgatgacactgtcatgagatttcatttccttatttctgttccaggatcactctttaaacaagaaataagcattaactctgaattgtctgcttgtagctgtatgagggcttccacaactgccaactagccaggtacaaactcatcaagcagaggagatggtccttgcatcagagggttaaacatgcctagaagttccttagctaagctcccagatactaaaaaatccctctaggttctaagaaagattcagcatgtacatgtgtgtacatgtatgtgtgtacatatatacatatacgtgtatatgcatatgcatgcatatacatacaaacacattttcttccataacatctcagtattctctgttctttataatactgttttgtattttaatgatcaaaattaatagttgatcatctgaaaacattttgacctgttttctccgtctttgacaaccttgaaggcacttgtaagtcactctttgcttctctattcctaggtcctttctcatcttcattgcaacaagaaaagagaaaacaattgagccctattttgtgtgtagcaaggagctactctagttaaacactagatctcttttacattctccaacatgttgttttagtaattattctactttcctttttttgggatattcaatttcttctttctttttgctcctcccctttagcaggccaacatactcaagtctccctcatcctaagagaacttttttagtatatcattttttttctatccagctgtacttgcttctgcttactatatcatttttaagcagtagttggcattactgtttcctgttctttagctactagttgtactttgacccactccagtctcacttccccagcaccaccactttatgaaaacaaggacttactaagatcatcagtgactttgtaatagctaattagtgtattttaattcgtccatcttcttgactatattttaacattgatcctgttggtcaactctgctaatcaaaactttatcctccttggttcccagaacaatattatcttgaatatctcatttctctaatcatataataattgtgaggtgcttggcacaatgcctagtgcgtagtaagaactcagtaaaatatcatctgccatcgacaccataaaaattaatttacttactcaacaaatacttttgtatgaagtttgtgctaggtaggcccagtaattggtacttggtatagagcaatgaaaagccctaccctcataaagcttatattcttggaagcagaagttggaagacagacattgacaaataaaaattaaatacatgatgtgtcagatggtcatacacacagtgtggaagaacaaagaggaaaacaagtggagagagagagggaggtggaagaggagtgctgccatgaaaatgtggtaatcaaaaaaggtcttactgaaaaggtggcatttaagcaaattctaaaagacctgaggatgtgggccatatgtataattgggggggaaaaagtagtccaggagagtcctaataagttaaaatgccccaaagcaggaatattcttggcatgttgaaggaaccttaaaagggagatcagttaggcagaaaaggatcaagcgagcaggaaggtagttgacaataaatttagaggggtaactggcatctgattatattggccttttaggcctgtggactttagcttttaatctgaatgagatgggagttattggagggttttgaatggaggagtgacatgttttgtcttatctggctcctctgttacaatagactaaacagaagtagtgagaccattaggaaactgttgtcataattcagtcaagagatgactgtggctgggatcagaatgggagaggtgaatgtggtgaggagtggttggattctactatattttgggtacagagcacaacagattttataatggaataaatttaggtgtgagagaaagagtcaagaagactcaagaatttttagcctgagcaacggaaagatggggtcatcatttactgagatggggaaggctccaggagtaacatattttgggaggaagatgtggatatgttacatttgaaatgcctattatacatctaggagatgtgtggagtagatagctggatatatgaatcttaagttatggggagtagctcaagatacaaagttgggagttgtaacaatgatcagtgcaagttctctgtcttcaatgcaattttaaatgttgatgttccattcttaattgtctctcttctttctctctgcacattttgagtagctttgtctgttggcttcagttaacattaagactcctcagtgtcaacttccatcttacactcttctcctgatctccagaactgtactttctgccacctaacctacattaccacctggatatgctacaggctgcaaaatgtgtcaagtagaatgcattatcttgcccctaaaagaaagttaaattttctgtgttttcagtgtagtgtaattgtctaacttaattgtctctaaaactggaaacctaagaattaccttctacctttctcttgatctctctttcccaatctactgacacatgtattaaactggcttccaaattctgtgaattctacttcaaaaattgctctagaaacaattccctctctttatccctattgtcacctcatcctaaagcctcttcatcctttgtagatttctgggagattgtaaccaacttttctctattctgccagttatcaagtctttacgctcatttgacattcacaacagccttggatctgtcttccttgaaatgaatcttcttgcttccctttgattccagtgctttttttttaccctcctgagacttgatgcatgatatttacatgtatgacatgtttccaaaagcattctcaaatttttctgaaagtaaaaacaaatgaaaaagtaaaacattttcctgggaagaaaagcaaatagtgttatacatttttgcttgttcatttgtttgtttatttaggagagggacaagcattagaacttcataagagtcttatatgctgtatctacaaataccgtcccttggcaatataattttagagttccttttctggaactacttaaggactgttttatgatcctcagcagactgttatattattttatagccataccttttatttgctgagtaattgtactcaataattgtttgtaattgaatgaaacaattcatcagatgttgggcactgaatggctttggattatttccaaaaatttaaaggataaagatttgctgccttcaaagctatgtacaaaaatatgatagaatgctagcgggatatttgtttaaaatacaacctttattacattggggcctgctcataatatatatgtggcacattttatttaaaatattaaagttcctggtgggacatgtccccataatcccagcactttgggaggccgaggtgggggtgggaggatcactagaggccaagagtttgagaccagcctgggcaacatagtgagataccatttctacaaaacataaaaaaaaaaaaaaaaaagccaagtttgtagtcccagctacttgggaagctgaggcaagaggatttcttgaacctaggagttcagttcaaggctgcagtgagctatgatcatgccagtgtactccagcctgggtgacgtagtgagactccatctcttaaaattaaattaaatttaaagctacaaatgaccccaaagccaccagttcaaccctctcaattttgaataccctattttaaattcctcttatgcgaaatgtaccttgtagtccattttaaggactgagaggatttggtatgttaaaaaattcaatccattatcaactcctttaggtacacttagcagtatgaaaatgtgtctttcggctcttcaggagagagtcatatgtatagttacaagacaatcccatttttatattgctgagacccaaatcttcccaactgattatgaagcataagaactcttcggaggtttaagtgagctgagattgtgccactgcactacagcctgggcgacagagcaagactttgtctcaaaaaaaaaaaaaaattctctgcattctacagtagggtaatataacatctatgatgtgaaatcttggggctccgggccagagagtgtcatgatccatatggatctaaaaggttcatagtggtaacagcctgcttcattttatgtcatctcctttcaagtaattagaatgtttctagcttgcagggattgcacacaaagggagacatttggaaccatgtcattggtgatttactggtgtggaaaattacctggtgatgtagccaagtagccattttcattctaacccagtcctacagtcctgaactgggctgaaccaacgcaccaaaatatatgcttagaaatgctcctatgtatcagttttcccaggaaaaacaatagtattatcgaaaacttaccattgtttcctaataaaaaattataggataccaacagactgttttttgttcataaatttaatattacagtatcaaatattaaagcaaatgggagaaagtttttcttatttggtttaattgaaccattaatgttagctacaatacccatcatgttacttttcaattatatttatattttcattttatttctatctgtatcattctcagaaagacttctttaaaacattcaataaaaatagaatttaggtagatttatttttagaaagttgagtttttttaataaatgaatataatcatcacttgacttaatttttttctgcacaattctagaaatcttatagttttgggatcctttggctttattcagtatgtaacagggatctgtttcctttctctaaatcattaattcaaatgatttcttatattaaaaatgtttggacatataggtattaatgagttttatgaaatctaatctttccaatttccccctaaaaagggatgtcatttaatcagttctaggttgtgatcaatagcagatttttttttttttttttttttttttttttttttttttttttttttttgcagctccctttcaccccgtagggaaacctgatatcatccttgactaattgcagcaaagagcctggctcaggtcctttgtcttataccgagtgtttatagattcttgagcccagcagaatctgaactcctggctactgctacctacttcccagcccaggccccaaaagccctatgtctgcagccccgtgcaccactgtgtgtttttgtggcatttctgaaacacagagctacttaacttgtttctaagcccagattgtgcctttttgattttctattttggtattttatctaccatttttctgtgtttggatgtttcttctatattttgaaataacttctttcctttagtacaagtgattcttattgtagaaactatcaaaaatttacaaataaagaatcattctcaacattcttagcaattccttctatcatatttttgcaaatatatttttgcctatttttattttacttactccctgtttattaacagttaaaagcattttcagatagttttattttttcatttaaaaaaatcttaccacatttttattaggaaggaaatggacaggtgtttatcttttcaataaaaaacatgggggaaataatttcttgaagtacatagtgacattcttccagccaatgttttatgctgtggtcattccgtctgtcatcagtattcatagaaagagatgaaaattatttaaattaactaggaaatcaattccccattcaaagcagtagttgtgtgtttcaaatatcttctaatagtcagtttcacacttagctttatcaaattcctaattatgatactcattacatcactctgtgtccagtcagtgtgtttatgccacagagcaattaaagcaaatcaggtgaaccaaattcaatcacctttgtagataataacctacgttgcttaaacttatggccgctcatacaattactgatggattgcctttttcttttatattgccagtattttaaatgtcctagtgaagttggggtagctgttgaacttcaactttatcacaacctcttttttaaaatgtgtaaacgaaaaaaccctccatgaaatgaccaaatacagttttcatgctgggacaaattagatgaataataatcataaattcataatgattatttatgattttatgtttttatagtgagatatgttttgttgaaatgtgttatataagtgatacttaagtttcctattaaaatagaaatgctaaaatggcattgttctctttagctgtgagtctagcttttgacctctgcttaaacggaactgttgttccatcccaaatctgcaactctgaggcctatgctcccttcactgctgtctaatggatacctatcaatttggaaggaggtttcaggcagctattcccggtaatctaatctcagctctgtccttttcaatattttcatcagtggcttggatgaagacatagataacattcttatcaaatcaatgccacaaagcagggagaaatagcaaatatagcagacaagagtatcaggagccaaaaagttttcaacaagttggactggtaggctgaatactgaaagatgtaatgtaaatgcaaggtgctacatgtgggttcaaaagaaacatgaaacaaaaaacccatctaacttagactgggctccctggaaatagactaagatagagagttgtgtgcataaggtttgttgaggagtgttcccatgagatacatgtgtaaggttgtaagataggcaagattgcacagacgaagaagtgcagtgaagcctgcagtgcgttgcggcctcatcagattttcaggggagttctggaaattgcatggccctttagagacacgctgaattgaagcaagggatctggacctttgaacccaatactagagagttaatggtcctgggtcaccccatgggaaagagcagactggagtaagattgttacctacagctgaaggcaatttccagggagggaggcagctgtgagctgttagtagtcaatattccaaccagctagggcatgaggtcttggcagagcaacagtgtacccaagaccgcagtgttacccaaagtatggtcctctgactggcagcattggtatcacctatgagctcactagaaatttaaatttgtaggtcctaccccatccaactaaatcagaatctctggggatgggacttggggaacttttaacaagctttcaggcctccaagttatttctatgcatattaaaatttgagaaccactgcctacaccaaccaaaaacattccaaatatggagataacatagagtttttagcaacaataatctccttctgtttcacttctctctttacacacacacacacacacacacacacacaacacacaacacacaatgtgatagaacagtgggaaaggaaagccaaaggggatcttaggccgaataaatttaagcatataacctagtcctaagaacgtatatttcagcttaatagagagaggaatattgttataaagctgtccaaagatggaacaggctgccttgtaaagttgtagaagtattcaggaacaggttggtgataccttggtggttgtatggtataacatcctgatcttcacatactcatcatctagagtgggagttttctttttccaaatggggttttggcagaactagttccactgtatcttaataagtaataactcaagaaagggttctatggatgaaaaaatgattaggtaatatcaagttaaatcaaagcgaacagacttctttcccataggagtaatcagacccttattacagtgcatgcttggtgaatcaacaaagtatgtgtatttatgaaagtatggggggaagggataatctatacagtatgcatcccttctaaaagtttgaccatgaaaacaatttctcaagaatcttatacaacactacagtatctggtccaatactatgcatagaacatgcactcagtaagtgtttgtaagatagatagcatagcatataggccaggccactgaagggaaatcatctcaccgtgagttacctgaatagtattctctagtgccattagctcaattcttcacgtaggcataagcctatacatttgccatgctaaccaagggaatttgtgttacgtgaattttgactctattcagacatttttttctatgactcctccaaggctgttattcttacctcatattctggtagaagtttaaggacttttttctgggaatattgattaattagctagctagctagagacagagagaggatagagattgattctctggcagagcctatttgaatcatattgaatctttttttttcctgagacttcccacaaggaggatggaggagaaattttttagaaatccaccgaagtaatcagggatatcttcagtaaaagaagctatacttaataaagtctctattttagcagatggcaatcaacaatagaggcaatagacaatagagtctattaaaattgctgggatctgctaataacgtttttcttttccctgaaacaaatgccattaaccctccttgacactctgtcttcatcaacattctaatagaatggaagtaactcataattttgaggatttttttcccacacaaaacctataaaccacaccacgctagtgattacttttagcctagttgctaggttgctgctggtaacagtaaaacttatcctgacaggtaggcaattccagaagcccagccaagcacttggtgtgtgtgagtaaacccccatacacttctcatgtagagtaaccctggccaacccataactcttagcaactattcctggtggacggacctggtctactctaagaagaggccaaggttctttaatagtgcagttgcaagaaccagaattgaaagtcaaagttctagcaagattttgcagactccttggcaaaccagtggcttgggactcattcttgacttcaagcccttaattgataatggtaggacagcttgcttgcgctgggttctgctccctgggatatgcactgtttgccaaatgagtagcaggtggacagacatctttacaatttgctgtcccatattctaaatgaacgtgacattctataggtctgagttaacctatgaagtcaccaatttcaatatcaaaatatttatgacagagaaaaggatactgaggcacagagagtctgtgactttcctaagctcaaaacaccagtttgtgttaattctgacacagaaattcttgtatttgctatcagtctcctttttctgtgtgtgtgtgtgtttttacattgcagcatcacctatatgatgttaggttctgtaactttttgagaattttctcacatacagtgatgtgttactttttgatatttcaaatagttctagtaagtcttttctacttttattagcgtattaacatactggctctaagagggcatctcaccacatctttgccattcttcctggaaaggcaagtttctctccatcttcttttttgtattccaaagttttgccaaagtttgcttttgaaaatgggttacctggcagagctttattattctaactttgaaagtacaagtcagaatcagacagtggcagttatatatgcactactgtgattactatataatgaaagtatctatggtgaaaatactgatactgacatatatttgccattttctaattaagtgcttcagtaaaaattaagcactcactctttgccagatactgcaatagatattgagcacattgaacaaaattctccatatacatatatatgagtccacattctatgaaagtataatgtttttctgagaaaaggcataatattctattaatatcagcttttgcttcttccaccatatattgaaagaattctgaatactgttataatttaatgggagaatctagagaattctgtatttgctttcactgcattgatgaactaagatttttaaaaaatgtattcttcatagaactacttttccatatttacctaatattattcttatatcatttgagcacatatttcactaacaaaacaaatgtgcaatgttattagttctaacatcaaaattacactgatactttaatttttatcctattatttttcatgcagattaaaataattatagctacatcacatgttgcaagttttaagagctactttaaaaatatatgcttcaggaaagacatgattagatggggaaatggatgatgttcatattttcaaatgaaaagttttaaaaaagtgcctatcacaaacactaaatttttacataaattatcaactactaatatatctacaagaaataccatttttccctacaaaaactcttaacaataattgttaaacttagtcctggaacctgctaatataatcggacaaatgttgtcaataagaaggtgaaaaagaaagcatatatagtttatcaaactataaaatatagtttatcaaaaccaatttttcctattgacatttattcaggaaggaaaatggatgagtgaaatgaacaatggtctctaagagaggtgggagatagcaataaattcagaccacgtttcctgtcattacagcagggaagtaaaagagctacagtcaactctcgaaagtacttgggggaactaatgattccctgtagacctgtgatgtttttgaaatttaattcaacaatttgatatacaccgcaaagcgaacagatagtcagatcaaaatcggaagaacgattgtctgaatggcatccatttttcctagatgtgctgtcccatcctgtgtcaattaaactttcaggtgatcttcaaacatatttccaagtaaaaggtattgcagttatcctataaactggcctcttccccagcactgcttttgctgtggtcaactttatttctttgggctcacaaaactgatagagcaaaataaggaaaacggaacattggattaaaataaattaattcccattctgtgactcactaaaaaaaaaatgataactatgcttctgtgagcattaataaggaaatgaataaggaaatgaccaaattgttcagtggacaacttgtatgggatttttaagtattgtgtcatcatcaatgttgtcaattagcatatactttgaaatcaactaaagcaaatcagttgactaatcattaagggtctttttaaatgacaacatctaaacagcaaatgttttattttggaaaatcatgacagcacaagaatgagccagatgttttacaacatgatatccataatttaaagtatgtagtagtcactcaaaggatttctatttcagtttccttatgatttggctaagctagaatttggaaaaacactttaaggtaatgtgagaaacagcaaaattcaacatgtggattttttcactaaagcttatttctgattattttttacaaactttactaggtatatgttaacttcatgacacttatagcagtggaccgtagttttaataaaatgtgaatgtatactcttttctcaataatattaaagaatgttgactttcgtgaggatatttttatttttctcaacattaagaactgtcaaagatttaattctacaacagaagacgtgaattttgttttctaaaggagaacagaatctatagaagaagtgttgctcatagtactcagattgttgaccaatcttaaaggagaaaccgtcaattaatttaccgagaagtaataacattatctttttcttcaattatgcacatccacaaagatttggggcaaaatccacttaaatgatattatacataatagatgagtattcatatgttgtaagagtcctggcttctttcctgcaaaatgattaaaacttggatcagaaaccaattaaaaatccattctaattcccaaatgtatgtaactgtactataagaaaaataaatatttcttcttgagggatatccattagttaaggatattcataacatggtgtcttgtaggaaatgttaatctttgggtgaatagggatgtttgggaataacaagactcaaagagatgttgcacttactcacttttctctgagttgttatttctgtcatttccccagtgcgcctgtcctcaactttgcctctctccttattcctttttttttttttttttttttgagacggagtctcgctctcttgcccaggctgtagtgcagtggtgcgatcttggctcactgcaacctctccctcctgggttcaagcaattctctgtctcagcctcccgagtggctgggattacaggcacccaccaccacgccctgctaattttttttgtatttttagtagagacagggtttcaccatcttggccaggctggtcttgaactcctgacctcgtgatccacccaccttggcctcccaaagtgctgggattacaggcgtgagccaccatggccgatccctccttatttctttttatctctacctctgcctcaatggtatttctctattactgttagcatttgctttctgtgagctcttgcacactgtcagcttatatacatgttcctgttcacatgttttcctgtccccagtggttacaacatgtcttctatctcagcccactctagaattgtcttacttttccaggtctcctgctcctcagtatttttcccacttttctagattcatgttttcccatctgcatatttctcttccatgtctgcactgtcatccgcttagaagacagcgcataaggacactgttatctgagcaaatcttcagcacagccaccatgaagcatggttaccttgtcactttccatttttcccatagtgtgtgcaaactgccctgatctgcatagaaaggtatcataattgaggaaacaaaatgcacaaaaatgtccttggttattccacccctcagaaatataggagagaagtaatttacagaattacacagaataacgctatgtcacatggacatggagttatcgggttagcatataattggaaaatatttcctaggaccttgacatttactcactttttgttttcaaattacatgtccctatctattagttgcaaattattttaatgcaccgtttaccaaagaaaggctgtttcttctgaaagctttcatttgacaagtaacttgtaaaaatattcacattgtgtatctgttttccccttctagtccaaactctagttatcttaaactttgcgcagttataaaaaatcataacaaaaaaagcttcctcgttgtcattcttgtcaaaacaggtttaccagacttaggtaaacttaaaatagttagtgtaaaagttaaaaagctgatttgctccttccagcgtgtttgttgcctttttgccacagcaaaattgtaaatgtaaacgtattccctaggagatgagctgggctgcaattttcagctaattgggagaagcagccctgagttgagcactgtcaggctgatttgagtcttaagatatgatgatgattattgtgtcaaatgtaatcaagaacgtgggctctgaactgactcaagggctggctgtttttaattcaggttcgtatatgaagtagacctccggttcaccgatagtcacagctggttgtagaagagagcaatttttaaaatgctatttcattctctatggagctctagggatcagagattggatgcacagggaggggacacatcctcattctctcctgaaaaattctattaattttcagtataataaactttctcttgagattccccagtggctctgtatcggtggttttcaaacttctcagacccaatgccacccctcttttcttttttaaataacaaatactttgtaataccttctttacgattataagccaaaatatgtagacaacataccctacttatacaggcaatagtttaaatgatgccgtaactctattttaaagagaaataagagtcatttataataaaataatatgtgttgtagtatgcagttattcaggcaggatcacactggaacacaagtgaagtttttagatcacgagactatcaatgcagtataaacaaatgcagaatgacaccattgtgttgtatggagactcaaataccatgaggggcattggtcatccatagcgtaattttccaaaatgctgaacaactcttggcaaaattcctaacaccatgaaataaattttttcttggatcgttatggcagttagttgcatggctgaaaaattcaatgtcttaaaatcatgaggaaaatatcttatgtttacgtgtaaaattgagttacgttccaggtttaggtgtttataaacagggtttccacatacatgcatgtccagtgggatattccaaagtgctgtcagacttgggagagttctttgttgtataagaagtctaccatcttcattccctctccacagaatgctattatagtaacactcttcaatcactgtgatagtcaaatgtcctccctcaatttctaggatgcctcttttttttgtggtctgtataatttggttaaatatctttccagacaaatactgatttgtgaattaatgaaatagcagtattttcggagcacctaacctatttctgagtgatacagttgccatttttacaagactaaatgaaattaccatttcagacctgccagattgtctagcccagtcttttacaattctgtgattatcactgcaattataatctattttcaccacttgaatggcatgatctctataaaagggtggtgataacactcatctattctccttcccctcacatagctatatcaatcgccccctaaccagttgttgataaatgcagttgaattttatgtaaaaattataagagatattattgtagctgtccaagacatttaaaatgctaaatgcaacttacgtggaggctataagagaaatatgaacccatttattgaagagattagctaatttagtaaaacaacacagatatacctgcatacagggataaatccctattgtctaaattattgagataaaataatgttttacaatgaaaaacttttagacaagtaggtaagtaaaatgcagcagtctatttgcatttcatctgggcatttgacaaagtctttcgttatactcttgtgaataagttggagaaatactggctagatgcaagataaattggatggcttagaagccacttcatgattttacgcaaaggatgtcgattaatagaccagtgtcaggtggtgatggaagatctctggtgctatgtcacaagcttctgttctcaaccctgacacactggatgtttttgacagaacatgagtagaactacagagaggaggcccatcaaacttatgggtgataaaaagcagggagggcaggagtattttgggtgacagaagccaaatgggtgtctggacaggatgcgttttaaggcacttttggtacttgatgtctgaagaccaggatcaaacttataggcaatctgaacatttgccaaaataacaggttaattttgacagaagttattatttgtatgctgtctatttctttaatacacctagaaagtattgaaataacattttttgcagacactcattttgaaaattcagaaaaaaaattgttaactttcgtggaagagtaacagaaactcagtcattgacagctaaatacaatgtgttgcccagtaaaatagtccaccccttcactttcatggctaatataaaatttgatgaaagatacaaattccaaagattgaatatctgtacatttgcaaagcaaaacacaattttgggcacagaattgctcattctcatttttaaacatcttggttataactgaacaatagttttttataacaaagataatattttcaaattattatgaggttcaactgaaataatttatgtgaaagcaatgtctaaactctaaaattctatataaatataaattattattcaataaattcacatcaagaaaattttaagttttttaagaacaagagcctatggccttgtttttagaagctgtataccttatcggtagtaggtttattgactttaattaaatttattgagtatctattaaattgccaggaactgtggtgtgaatctttgccctcaaataatttacagtaagttgtggttgatgaatggtgatgacgatgatgaatatccagactatagtaagtggtatattcataagtcagaggattcttaaaaccagatgcaccctcagattcattcctttcatgttgtacttctaattgaaaaaaataaatcctaaattatgactgttctttataaattttaattgatcttataaaaggccatcaatacatttcaaagtatctaggtcttttaaatgcaatttttcaccctggtaattaaaagtacgaaagcaagaaactttaaatctttattttgataagttttaattagctcaagctacttgtaatcccacatcttgtcttgtaaatcatatctgagccattaaaataggtttacaattagaagggcaattcttttagaatctacttaaactaagtcacttcgacaaattaattcatcgttcagttggttttattaaaatgtatttatttcactgtaaaatgtctagtaaagcaatgtatgaagtattttattttcatgttagaaattttatgtaaaagatatcccaaaatacatagacattcagatactctctgtatcattaaccaacatttactaacttatcatttagagaaggccaaaattgtatgtactataactttgtataatttcataagaattaaaatattcgattaatgcctgtaatgccttctttctaaatcaaatcctcaagcttacctcgagttcaaagttcagtatttattgtaacacatctcatagatgacggatgaagatggtaagcaaaggaataataatttcttttctcttttcacacatatatacacacataccccataatcctaattcatataataataacagaaaacaaagggcttttgagaatagtgacatattaatatccattatatttacttcacagggagactggcaagtctaccttgagaggtaatgtcttatagtacagtggactagattgtttcaagatttgtcatttattttggcaactcacccagcttccctgaaagttaagttcctcatctataaactgttcatgataattacaacctgcctcattagcctcatcaagctatttaaaatatgaaaggaggtgctatctgtggatcctgtcaaaggagcttgaaaactgcagaacattattttagtgtaaaatactataacaatacatgttgaatataaaatggctttttcttaacttttattttaagttcaggagcacgtgtgcaggtttgttatataggtaaactcatgtcatgggggtttgttgtaccgattattttgttacccaggtattaagcgtagtacacattagatatttttcttgatcctctccctcctcccaccctccccactccagtaggcttccacgtctgttgttcctctctgtgtccatgtgttctcatcatttagctcccactaataagtgagaacatgcagtatttggttttctgttcctgcattagtttgctaaggacaatggcctgcagctccatccatgatctctgaagaatctccacactggttttcacaatgactgaaataacatacactataaccaacagtttataagcaatgctttttctccagaacctgttatttttgactatttagtgatagccattctgactggtatgtgatggtatctccttgtggttttgatttgcatttctccaatgatcagtgatgttgagctttttttcatatgcttgttggtcgcatgtatgttttcttttaaaaagtgtctgttcatgtgctttgctaaaagggccctttcaaatgtgtattattaaccacaagagagtactgagtaagagactaggtaataaaagtcacaaatatttcgatatcataattcagaatttagatcagcggttatgaaattgttcgtatttccaaattccactgacaggactctactataagtttatttcatctgttgatatgtttttagccacttctttcttttaaagtgaatctgttgtgtgtttgccatttgatattagaaaactgaacctgcctgctttgctgtcttctgaatattatgtatcaacaactaacaagctacagttagttgttttgttctgtttttctctaagttattgtggatgaggatatatataactgcacagtcttatcaggtttgtaagagatgatcttaggctcatcttttaaattggtttttatactattttaaacaaatccttttaggagagaagaaaagctgcttagtctatcaacattaggaaatatatctttaaagagtttatcactgcaagtaaccaaagccaacttaaaaattcgcattatacaaatcattgagaatttatttagaacagaaatgtgtccaactataggtcaacaccaattttaagtgtgtaattatctgggaagtagtgttaactgcatttttttctaaagatcccttacagttgtataaatgcccaaaaggatattttgagtctctgtatattaaccaaaccaaatgtaattcattactcccaacattatatttcaacctctccaaatagtaccttttcgtattgtatcagcagaaaaatataaaatgcagatcttaaagagtatcaatctctttaaaaattcaagaaagaaaaaaatatgtgtgtatagagacgtgtatttcatctgctcataacactgtgtacatttctttatcaactaatttttttcagtgatttatgagttgaaatacaaatcaaatgaaacgggtaatgcaaagtaaagtagaaaacacattttctactgctgtctcctaatgcaggtcttttcaggaaagtactaatggttttagggaaagtgtataattatggttgtttccctaatgataaattcgcaaatctctattttaaaaacattcataaggttaaaaaaatgagagatgaaatgtgtctttcaaaattccttacgtgattgataatgcctatactctcttactatctaaagtctaggtgatatgtatattttttttaaaaaataaaatgtctgtatcagtgaaggaagtttacacagatagcttcaaagctgtggtttatctttggaggattaatctatttctcatgccagtgtgttgctactgcacatgttaaaaagtcatcctgtggtgtctggggtgacaaaagatgggaatgagttttctgagaactaatcagcaatactttgggaacatttaggtcatggtttccaattaactctggagagtttgagtaatttagtaccagacctcaagagagaggggatgaaaacctcgttaattcatatgttggtgaacggcaaaccagcaaatttgcattaaaaatggatttttattttaaagcaaagagcagccagatcttttctgcaatagtttgggtaggagaatatctttgtatgtatgtgttcccttatgtgtaggtatttgtatgtttcaacgaccctgcatatggcaataacagaaaattaaatttgtgctctaaaatgaagaccaggattcagtgacataatcttccttgtgcctttctttcttttagtacaatgaatatatcagagaggagtgtattccaatatctgtcttcagagttacaaaaacttcttttctagaatgcaagacttgggctatacccccagctctgccacttaacttgtatacaaccttgggaacatcattacaattctctcagaatcaatctctccagccctaaaatgaaaccagcaaaagcctgtactgtatatctaaaaggttttttatttttatgaaaattagttaggcaaacttttgttaagcatccatcactctattttgagataaagccttgctggatgatctccacctcttttgatggaaagagtaaaacatgtttaagatacatttatcacttgtttggcaaattgagatagaagtttatgaaagcagattgatatatgttacatttgagctactgggaaggactccagatggtttatagccttaattacattgtaactctagttaaatgtttacctatctgtaccctctgttaaacttgaatatgttaaataccaaagtccatgtattattggattttctgtcaccatcatcaggcacagatcctggtacacaataggtacggaatggatgcatggatgaattattgaattagatgttggtaggcatgtggaaataagaatgaggttcagaattaaagataatctgtatcgagtgtaaagccattggcagagaatgaaatatccagctgagtatacatagaaaaagaaggtaggtagaaaaatggaaaatatcttatgaagtgatgatagaataactctgaatatgtttgaaaacatataaagagttatgtggatgttagctttaaaaattatcttccatgctgtacattagatctgccattcttcatgctgtggatgaaaagcaagcatcagaagttaaattaaaatgatgtcatatattcctcgccttacagtttcataacagaggagaaaagagaaacattctctcattgccaccacccttctccagtcatatttctaggtagatgttgcccaaaaacagataaaaccacagagttggttttgctaggaatggactactaatccaggcaatgttgacagcttttgcttctcattagtgcacgttactaatagaattgctagagattaaaaggaatcctttctacaaagtgctgtatatccataggtgacaaaattctagcttcccctcacaagtacaatataaagttatgttttaaaatcaaaatgcaatttactagcaaactagtaggaactgttatggttacaggaaatttgaatttcagattaactctggttctatgagtagcggttgatatggcaagaatcattttgatcttacatccaggtgctactaaggtctctctgacctatatctcaccaaaaaaaggaacaaaataatgatcctttaatctttctcctaaaatatcataggaaatgatagtggctaaattgcaaataaactaggaaggaaagattcagagtattttatgtgattactctataacaatgccaggccatagtgaaagtgttatttagcagaagactgagttctttgaatgttcctaatttatcacattttaaaaataacctgggcaaaataacctttcatatcagattgagcctttttctaaaaatactcaatatgtttctgtaattatacctacacacttacaattccacagtataatgcaccgataaagtatttttcatccatatatctaatagtagaatggtgtgtatacaataattaagctctttaggcttaccccggaaagcaacaagtttcccttcctttttcctttttatgtattatgttggccataagaaattgatgatattcaactcaatgcagtcttagagatttattcagaaataccatggtgtgtgtgtgtggcgggagtagggttctaatgacaggtcagaacttacttatttgatttcttcattgataatcaggtcttaaaaagaaaatgggtatgctgaaaacatgccttctgtgattctttaccttcatgtgcagttgtctctggataaacactttctttggcacgtatagggttgcactaagctttatagctccaacactccgccccttcagtagattcttgcttgtaactgatgataatgcaaacctgtattatctataggtctccttaaagggcaaccaaaagttcagtagcaattcaggcacaattactgcatgtgagaatcctccatcttgttccctttggagaccacatatatttcttaggcaagtatatttttaaaatccttgttcagcatgacaattcaggaggtcaagttctcccagaaagcagattctgagaaagtgattagcatgaaggaattttattggagagtgctctcaggattaacacctgtgagcggaggaaaggaaagggagcaggattgggcagaaggagaagctgggctaccatacagtcacaactacaacacaatcaaccctccgcctctccttcctagccttccccaggaggatctctgaagtctgaaggtagaatagcccttcagaattgtcctgagttgcagcaagggacccaggattttataccccacaactctcccatcaaccaatacgtgcagcccgtctcggggacatagtgggtaactttgggctaggcacctctctttagctgagtccagctctcagacaggaataacagctgaggactgtcagccagtagcactaccagcagctggggtcagaagtatttcagtcctgaaaaggggtccgggcagcccagcttagcatctactatgccagtcgttctcaaatctggttcctggcaactgtgattctcaagctttagcatatattggaaggcttgttaaaacacagcttgccggattttacccacagagtctctgattcagtagagctaggctgaggcctgggaatttgcatttctaataacttctcagacgttgctggtgctgctggtccatggactatgagaacactgtttcatgctgcccttatttacatactgagaatggtacacagtgctcttatgaatagaatgaaaaccttttgaaatcacattattccttactccatcaaattctcagctatttttgtgcaccataaagctggaatagctgattataaaactttgttatgtaaaaaagtacttaaccaatacagtagattctgtttgcaaagcattattacagtttctaatatctggtcattgttacttgtaaaattcagccaaattttctccagggcctgtagtttgataacttggacaaaggaatttaaaaaaaaatctaattcaagacctttggttttttttctgaacatatcttttttttctttatgattcttatttttacattttacttatcatataagccacttaaacccatatggttccggaaaatttaaaactatatgatacatttagagcatgttgaatgcacagatatggaaattaagtattcttgactcattctagactagacctggcacaattaaaatttagggattcaacgtacacacacatagattccgagagaaatgttgaagccgtaaaacccccacacaagcaggaaacaacagtcttacctattattcaagaggcacgtaaaggagctcatttgaggagattttctgctgttattgccatcgaatttttaacgtattttccaaattagaaaatattcagcctgatgttgtcaatatttcagaccacaagggtatcatttaggaaaatggtttcttactgtcctgaaagagttactgttcttccctaagggcctaatttacaaagcagcaaacttgctggtaggatttggctgaaaatcacattgtctcggtagaactctttcatctgatttatgtgcattgcattttgcaaataactcttggaaagttatttactagttactttctctggaagcagagggtaagcggcatttctagtttaaggatagaggagctaagatgcatcaagcgcagctcatcatgaagctgatgctgataaaatgcacaatattacattctctaagtttcactctgccatgggagaatttcatatttttaaattttgtttgaaattggactacattagaaaatatgtcaaatgtctaaccctgcatttatattctggaatgtgacagcttatttctgttccaaattttgcactggagatggagtaagtcttaatgcaaactgcatgaaactgccacttttataggtcacacccagtcaattgtcagcagttacacatggttcaaactgtaaggtgtatgcccaattgtagcattgagattcgtggagttgttgcagtggttctgaatttttcaagcatgatacataaaaagataaatgactcttttgatatttctccttgcattgatagtttgcctgaaaactagataagcagggagccggcagtccacgttagcccttgaactacatgaggtttaatttatttgcccaaccagaaccctacactacctttcagctgtgcagtattaaagtttatttaggagttgataaatagcttagtgcaatgcttccttttttccagtagctacatcctcataaacctattctaccctccaccagttaatgcagacagaagatttttatccagtatgagcactgaaactccactgtggaagactgtgtgctcagcaaaaacctcacccatgatgaataaacagctcttccgggggctttgctgccgctggctcggcaggagttgtttattgcctggtttgcacatcccatgataaagttgctgctgaaataaattgcagttttgcataattattgacaatcacatcttaacaagcaatgtgtatcatattcaagtgttcaattttttaaaatccatttttagcttatgtttaatcccagaaagtgtttgtgtagtaatagaaggcaaataagacatttaaatagagtactaatttcctcattgcagacaaagtttacctgaatctttttccataggactgttactgcctaaggcaattttcctttctaagctattattatatagatatttgctgagggcatatgtgtgtgtatccacaatacatgcattttatatatatatatatatatatatatatgatcaaaaatatgaatacatttttagagtttttgtcatgaaagagtttgtttcatctttttaaaatattacaggaatggggaaatgggatatgggtagaaggaactaatgtttttgagtaactgtaatgtataactgtataacgtggggcactcaacttcacaggaattttttattttaattctcatcacagcaatagatattgcagatgagaaactgagaatcagagagggaacttgccatatcacgtaagtggtaaagaacactgggaattgaactcagatctgcctagtttttaaaactctactctttttcattacacataacatttttattttggaaaatgttctcagttgtatgatcaagtagttaaatatgaaactaacacaataattataactgatgtcatgcaaaatgatagtttgcacaaaatgatagtttctatgaaatgttatttctttacttgttaagtctttcttcctttgccctccaatccccttctttttgtcttttcctctagtcttttccttttgattctaggtttgtattttcttgacttttctccttgcatatcaaatccttgttttctgcctcagagcagcatcaaagacaagcatggtacagggattttagggttttaactataaaggtttgtctcaaatttggcagtatattaaaaataagctttcaaaattgaccaacaaaaactacaaaattgaaaaaaaggtactttgaactttcacatgttcaaatatatgtatatatatttcacatatatatatgaaacctcctctgtggagaggggtttatagaaatctgtaattgtcattcttgcatgccttcccccatacaaacgcctttaagttaaataaaaatgaaagtaaatagactgcacaatattatagttgttgcttaaaggaagagctgtagcaacaactcaccccattgttggtatattacaatttagttcctccatctttctctttttatggagttcactaggtgcaccattctgatatttaataattgcatctgaacatttggtcctttgcagggtgagtgagcgagaggctgctttggaagaaactcatagattactgcaacagttccccctggacctggaaaagtttcttgcctggcttacagaagctgaaacaactgccaatgtcctacaggatgctacccgtaaggaaaggctcctagaagactccaagggagtaaaagagctgatgaaacaatggcaagtaagtcaggcatttccgctttagcactcttgtggatccaattgaacaattctcagcatttgtacttgtaactgacaagccagggacaaaacaaaatagttgcttttatacagcctgatgtatttcggtatttggacaaggaggagagaggcagagggagaaggaaacatcatttataattccacttaacaccctcgtcttagaaaaagtacatgctctgaccaggaaaacatttgcatataaaaccagagcttcggtcaaggagaaactttgctcagagaaataacttagggattggtttattaaattttaaaagttgacatttttgagtgtttatttaatattttacagggaaagcatctgtatgaattgtctgttttatttagcgttgctaactgaatcagtttcccttcattactttcaaatatgttttgaaatgttaatctggcattttgtagctttcttcctaacatgatctgtgaaaataagaatgagatggctgaatttgtcgtagttaatgatcaaacaattttcagacaattgtttttcctagaaacaaaaattatttccataaagttccatatgcataaacagtgaaaacagaacgtggggtagttttgtttaaatgaagtcttggtgagaatcatattctgtagtacaaggaggctcttaaagtttattctcaatacctgatataattttcctgaactattatggagttttgttatgtatagttggtttttctgacttgatataataactttactagtctctcaaatacaatttggatataaatcattataataagatgattgattttttagactaactttattttttgatatttttaaactattatgaaaaactattatgaaactattatgatatttttaaactattatgaaaagtatattctagtttgaataattccagaatcaaatcataataagcagaagttcttctcctctccctcctatcgttctccttctcctgtttttcttttttgatatgatagttgatctactttgctgctctgttgcatagagtacgtaacagtggcaatgtatggctcctgaatttatcgttcttgcttcatcatcctgctttgaccccactttctcctccaaaatgcgtgttgagttagtttgatcatttggaggtaatttgtttggaacagtatcagactttatagatatctcccatggcttgtgatagaatataagggcaatgcaaatgtagagttttttgctcactcttcgatgtatggttagacaatgtaccactgtaatatatttggcttaggctatttcataaataaaattttattataaaatattataaatgctgataaagctactccagaattttaatagatatgtgggtttcccggccagatgcggtggctcatgcctgtaaccccagcactttgggaggccgaggtgggtggatcacctgaagtcaggagttcgagaccagcctggccaacatggcgaaaccccatctctactaaaaatacaaaaattagctgggtatggtgacctgcgcctgtaatcctagctacttgggaggctgaggtgggagaatcgcttgaacccaggaggcagaggttgcagtgagccgaggtggcgccactgcactccagcctgggtgacaaagtgagacttcatctcaaaacaaataaataaataaataaaaatacatgggtttacattttacccatcagctatggtaggtaaataataagctttgattaagtctattttagtctatttttagcagattactttgaaaaataaagaataacccaatgactaaaaaattattttatgtcagggatttaataaaacatatctttaaatctagttgagggcaaaaatacgtctattttctactatacaatttgtatttatatctgctgtattatataatgaaaatttatctctatttctaatctcaagaaactgcaagcttctgaatcattaaagggaagattcaccatgtgtcctaactatatttactatggaagcatggaaaataaatattttatgtttagatttctgatctctctttcaaaagcagttggaaattatgctgagaaaatgtcttagcttatcccatgttactcaagaaaatgtatttattcgtttttgtccagtggcttaaccaaaccacagtttatttgttgctcacataaagtccagtgtcgatcaggctactcttttccatctttgagctaaggcacatattacacataactttcagtgtacccgaggtagaaaaagagagagcttgggaataaggcaggggctttttactgtctcaaccccaaagtgataaactacatttattctcaaaatccagataaaactcccatagagcctctgaaaacctcaacatttgcgtcttaactataataaggttaactaagattccaaaattattttaaaacagagacagtttccctcttccctggcagctaatattgtattttctataaatccacttgcccaaggtttaaactacattttatggattgaaatgacatttatagccaactcctgatttttagttagatggttggataatgatcttttgatgaaagactcggagatgtcatggtaaaacggtgaactactgaaactattgattattgttaatggcacatttcagctgattgaattgagtcaagaaactggtgttgaagagcaacaaatggaaatgccgagcttgaaaataaataaagcagcataccttaagagattacatgcaatttcagtatttcagctaaatggaagtgtttgctttttttcctctatgaatttttattttgaacaaaaggaattttctataatatgtaggtaggagaaaagtgaaatggcatgctttttcacttcatttgaagaagctggtagcattgtattcatagattcatgctgtatagcaatcatagttctcatatattaaaaaaaaaggaaatttgaaatgcctagccaaagcaacagctctgccaacagattttgatatatctgtctaccccaaaagtagtgatgatttacttcatacaaatgctagtgaatgaagagagagggtgaaaaccttcacaaaatgtgtttttctctaagactgtcaatccgtttttctatatatggagactccagctcttgctagactacctatcactttcgtctatcagccacttcgtaagatatttattctctcagcaataatcataattcatagattctttaaacatacatgtaatataaagcatatacattctgaatggaattaacatgattaattcttctctgaaagacattagaatttcctcccgtattataaaaaggtgtaactcactttccttactaaaatcaagaactttaccgtcgtccttgtacttcaggataagggggtgtttcttataaatattgttatttctgatatgctaactggaatttttaagcaaatgtatttttatagaacgccatacaaagcctttaggggtgaaagtttcaggatttttaaattgcagatttatcctttaaataaaaaaactatattcgtaattgaatcggattatttctctatccaaaacattttctgctttgggcctaagaagagttgacaaagctgttcatggttcaaagtactaccataaaaccctgggtaactaactgaaaatggaaagactctgtctttctgaatatttcacaagagtttcacaaatattaagtggttctctaagtacccctgagagatcattgtaatattagcttgtaaagacaatgtgggggtgtgggtatgtggtgacctttatgatgttcataaaggtggtgtaattaacatatttttctcagcaagacaaactaaggagcaataaatatatgagataccttcatctgtgatctgggtcatgtctcaggccatatctttcaaatcactcccttccctaatctcgtgttttacctacgtctcctctcaatccccccattataaaaattgtcttctgatgaataaaacatttccagagagacaagtttcataaagtttgaattgtacatctgagtacacctatgaattaagatatctttgatttctaatatgttattaaaattgggtgtggtggctcacgcctgtaatcccagcactttgggaggcagaggcgggcggatcacgaggtcaagagatcgagaccatcctggccacaaggtgaaacccccgtctctactaaaaatacaaaaattagccgggtgtggtggagtacgcctgtagtcccagctactcaggaggctgaggcaggagaattgcttgaacccaggaggtggaggttgcagtgagccgagatggcgccactgcactccagcctggtgaaagagcagactctgtctcaaaaaaataaattaaaataaaataaaataaaattggagaagtttctcaccaaaattttggcgcacggattaattctgaagaaagaagaaagaatgcaatcttagtagcacaattagtaccttgaataaattggagtatcgtatttcttggactatctgagaatgcagaggcaatttaaggatccctaattctaaggagaagaaacctttagtgtattccttcctgttgctttagtttgaattgagttttatatgtattttttaatctttctattttgattgttgtctaaagagtgtgaaagtgaattttgatatttttattttgcctggcgatgaatgccttctgctctggatatttaaaaattatatacacatatatgtgtgtgtgtgtgtgtgtgtgtgtgtgtatatatatatatatatatatatatatatataaaatttttctgagaacttttattaattcagcgtatctttgctaaacacctgccatgtgtcgtggtgttaggtctggtgatacaaacatgttcagagagatgattttctttcttttttggggggtgggtaagggaaagaaggcttatacaacagaatcttatttctcacagttctggaggctgggattccaagatcagggcctggtgagggcccctcttcctggtttgcagatggcttccttctctctgtgtcctaacatagcaaagagagacagagctctgatgacacttcctcttgttataagggaactaattccatcataagggccccaagaaaggtgcttttcaaaaacagttcagtaaaagtactgggttgtataatcactttaatgagtatcaatccatatttttaagatagaaatgaatgaaattagtaaaatagaatagaaataaggagtccatcacttttaagtaagtttcaatattgttcgtaaaactttggttcggtggtttgtgtgtgtgtgtatttgtgtgtgtgtgtgtgtgtgtctgtcggtgtggaaatactggatcactttgtaacatatattcaaaagcctctgtattttaacattatttctgcctttgagaggttcacattccagaggtgaagacatacatcctaagacaaaattataatagcattatgagaattacagtagagagctggacagggtctagcaaaaacagaagactaggctaaaccttccaaagaggccaggaaactcacctagaacggtggattttaaccttgcttatgcactgggggagattttaaaaatatctctgcccacaatagataccaactgaattgagcatagcatgtcctacccatgaatctattgtccagtgagaacctctgtttagagaaagtcaccttagaagaattgttaggagttatttaggttcatggggttgaaaagagcattcgtgatagaggaaacaccatatccaaaggcttagtcagtgtggtagtgtgagaatctgaaggaacttggctggggtatggttgctacaagaaatgaaattagatcaactggggctaaattatgtggaaagacagcatgatgtagcagctagagtatggaccttgtaagcaggaagaccccttatttagcacttactagcttattgtctgacctctgagtcccaattttactcttctatacaatgagtacatcacaggattttatcaggtttaaatgataagatatatgtaaaatgcataccagagaggcagactattggactcgaagggctcagtaagtgtaagctggctctctctgccccttgccacctatttttcagactctggacttttatcactttaagtcatagcctagttctaagcaaggaaatggactaatcagacatgtttttaaaagatcattctggtagtggttaggagaatgaattggaaagatatgagacccatgcagggacaacagttaggacattatttctgtaataagccaagcaagaattgatgatcaaagtggtgaggttgaacaaacaaaacagatacgtgagctatttggagataaaatcaacactgtcatatgttttgtgggaggtggaggtgagcagaaaatgtgaggtaaaatgagaaatcagtgcctgcttaccacttggcatgattgactgaaggtagtgtcttcactcaatcatgagttgcagaattcaagatggcaaacagttgtgaggagcaaagtcaagaacgtgtttgattttgaggtatctgtaagtgaaaaatcagaggtgaaaaccttacctctcttgaagcagttgtgaatgtaaatctaaggtttggaaaaagatctgggttaaagatttaaaattgaaggacatcaacatggaagccatagaaataaattatattacacacaaatttatgtcgttatttgaatttctccatggtccactcagaaatatatctaaatgtcaccaaaatgttacttactgtagtacagaattggtattaagtgatactattgtccatgttattcaaaaagacagttatagggaccctcttaataaactaattgtgaaaaaggcaaagaattagcaaagctttggcataaaattcatatcatgggccaggcgtggtggctcatgcatataatcccagcactttgggaggctgaggtgggcagatcacctgaggtcgggagttcgagaccagcctgaccaacatggcgaaaccccgtctctactaaaaatacaaaaattagccaggtgtggtggcacacgcctgtaatcccaactactcgggaggcagaggcaggagaatcgcttgaacgtaggaggcagaggatgcagtgagctgagatcgtgccattgcactccagcctgggtgacacagtgagactccatctcaaaaaaaaaaaaaaaaaattatgtcatggaaaaagtaaaagtctttgcataatgtatccaagatcatgaaaaactcttttcaataagataattagttccttttcttatataaacatggaaattttcatttttccttttattctcatattgatactataaaaaccccatcctcattcacaatactactgtctctaccctcgatagataccagttcaattgaacgtagcatgttctacccatgaatctattgttcagtgagaacctctgactataatgctcaggaatactcaagactcacatgattgtcttcttgctatatttagttactttattattttccattttgggaccctgaattcctgtagatctcagagaaaatccgaaatgaaataatgaaaataattaaaagtttagaaaagggagtcaatggggacaaatgttcaggactggtcttttatctcctgcaggaagaaagactgaatgcagaaaattagaatccatttttcatccagtcaccccaatttaatgcaatatgagtttagctatttgattttaagtgttgtaccgttttggaccatgttaccatggtaacatgaaccatgtctcattcatacgtaaacatgttaattgtattaaaacctttaaaacctacttctggatgttgccattacattaaacaattatctagaatgatacaaagtaatgactaaattgaataactttgtaaattaactattggattttgtaattttatatctataaaccaaaagaaaagcccacattggtaagaagacactgtgcatactgaaaagtcaattttgttagcctccaataaccattgtgttttattcctcgcagagcttttgtgaggatcttataagggaataaatatgaaagcactttgaaaaagctttcaagtgaaaggtccttattaattttatgaattaccattaaacaaaagtcaaactgaagatgtaaatctaataggatgctcttaaaagtcaatggatcaaagttatattaattaataaagaataataactaaatattttatgtttcataattggcaaagtatctttactgtcattttctaatttgatccttagtgaaaacctgtgatgttggtactcctattatttccattttcatttgagaagaataaaattggagaggttaagtaatttatctattgctacttgttaaaataactactaaattttattactcccagttaggagggcaattatataaactaaaagcttgtcacaataaatgtttacttttctgggattaaagtcatcatgtatttttcaattattaaggggggtaataataataatagctacctttttaaaatagttactatgtgccaaggtgtgtactaagtgctttgcttgcatgatgtaataccatcgtatatttagtacagaggaaaaactgagaggctgggtaacttctactaaggtaacacacaagtactggttgagtatcccttatccaaaacacttgggaccacaagtgttatggatatcaatttttttctgattctttttttggatttcagattttttcagattttggattacttgctttataattatgggttaagcatcccaaaccccaaaattcaaaattggaaatactccaatgagcatttactttgagaatcatgtcggcgctcaaaaattttcagcttttagagttttttggattttggattttcagatttgggatgctcaacccgaatatatagaaaagtcagcatttgaacctaagtttgactttctgatcttctaccaactctactgtcctacccattactctacattgactcagcattacagggaaagacccaagatcaccaaaagcaagcttcaaatcactcatctaatagaaattagtggaaatatttctacttcctaaacatccatctttcctttacattttaaagtcaagtttctacatctgcctcccaactgaaacacttctctatgaaatcaccataactaccaaatgcaaatatttttatcaagtcctcattgccctagaaatctactcatattttgttattactgctcactacagcctactgaaaaatgtctcaccttttgacttgccagggtgatatattatactaattgtctccttgtctctctaagcactcattccttcctctttctttcttctttttttttttttcacttttattttaagctctaggggcacatgtgcaggtttgttacatgggtaaattgcatgtcatgggagtttggtgaacagattattttgtcacccagataataagcatggtacctgataggtagtttctcagtcttcaccatcctcccaccctccaccctagagtagatcctggtttctgttgttcccttctttgtgttcatatgtactcagtgtttagctccacttataagtgagaatatatggtatttggttttctgttcctatgttatttcacctaggataatggcctccagctccatccatgttgctgcaaagaacataatctcattcttttttctggctgcacagtattccctggtgtatatgtaccacattttctatatctgatctaccattgatgggcatttaggttgattccatgtctttggtattgggaatagtgcagcaatgaacatacagctgcatgtgtctttatggtagaatgatttatattcctttgggtatatacccagtaatggcattgctgggttgaacggtagttcagttttgagttcttagaggtatttccaaactgctttccacagtggctgaactaatttacattcccaccaacagggtataagcattcccctttcttcacaacctcaccagcatctggtattttttgactttttttttttttttttttttttttttgagacgaagtctcgctcttgtcccccaggctggagtgcaatggcgcaatcttggctcactgcaacctccacctcccgggttcaagtgattctcctgcctcagcctcccaagtagctgggattagaggcgccttccaccatgcctggctaattttttatttttagtacagacagggtttcaccaggttggccaggctggtcgcaaactcctgacctcaggtgatgcgcccgccccggcctcccaaaacgctgagattacaggtgtgagccaccacaccaagcccacagtatcaattctatgcattcttttctgatttcattaatctcattatcttcatttgatatttagtcaatagttactgtcagttatgtgttagttattatactagaaacagtcttttctccatctcctttaatccaatgatttgaacatttttattcctttccaatgtctgtcccacatttcttactgtatgtaggacatttcttactcaaatgtctcacaaatgacataaattcagtatgacccaaataggccattttttataccaagtcttatttcctatcctgctgttcatcccggtaccatcttttcagtcagagagttcagatcatatagtcatttctaaatctcccacttacttgcctcactttcaagttcatttttaaggtctgtagattctgcctccctaattctttatgaccattcctttctcactagccccttacctccactctcattcacactcttactattttttaccctcctccactcattcctgcccaccagtggctccaatccaacttgcagatttccatttaaattaagcttcctaaaacatagcttaggttgtaactacaatgcaaattccatgagagcaaagatttcatctgctttattcacttgtatatatccattgtccaagactgtgtgtgtcacatgaaaagtgttcaataagtatttgtcagtgaacgaaaataatatatgactcccctcttcaaacaccttttttgacttcaaagcccttcagaatattctacagactccttcacctggctctccacaattgcccctgagtctcgtttccaatcttatttcttattttacctctcaatgcaccttcaactcctactaaaatgaacagctagccagcttacttctgtgtctttcgatgatcttgttttttgtcttgagattcctttttttcatctaagcttacccaaacattacctacttttcaaggaaagccattttcgaatcttccctttttccctgagcccccaagctggaagacatcttgtctccatctcaattcctataggcatttctctgcactttaaatgacgtttagtacttctgacattgcattagagagaggctggggtggatagtgtttcatagtgtgaactttgaagcccgactgcctgagtttaaatcgtgattctggggcttactgaccatagacgcatttctgaattgctctcagattatggagcataaatcaaaagtaatgacagctacctcttcaggttgttgtgagggtgatgcgaattaatgtactgaagtgcatggaacagtttctggcacacggtaagcacccaataaacatagctaatattatgttattactattttcaggcttatttttatgtatacatatagtatgtaattttatgtcaatatgtataaatagactttggtattgtttatttcactatcaccttgagagcacaattctcatttgatttgtgtgagaaactacttagaaagaaatagacgtgtgaatgaaactatgcttgaaatattggttactgtgagtgttgaaaatccattttgtttaaagaaagcttcaattgttaatcttccataaattttagttcttaagcgttcatattgactcgttttggaaaagctctttaaagtcttgggatataaacaaggctgaataccctcattcatgataacaaacatattatactgaaaattgtaagagagatattttatctttcataatgccctccttgggaaaatacattgacttggcccttctctttcaatcagacaccaaagttgagattgcctgaaacacagtttggtaaaaggagtttctttttcccaaacatcctgagtaacacaggaaatcacaccaatgactgatagataacgttaataaaattaataaagttgttttaaatgcataccatggggcagtggcaatgaaaacattgagaaggctgggactatttgccaactttctttgatctccattagaacctggacaagatccacataatttcagaacttcttctccaaacaagaattgaaaaggtcaggaaaagtttgaccacagaaaaatgtcaaagaattttgtgtcactttctcctcctcccttcctctaaccttgaataattttttagggttattggtctttgggagcagactttctagaccaaaacaaaaaaaatgatattcctctatgtgataggtaacaatcactacccatcctactggaaaattctcaaagtgtaaattgaggggataaaaaaagaatcttaagtcctttaaattatttttaagatgaactacattagtgcctctcttgtgcctttcataattctgataataaaacattccaggtattagtcaaagattaatggtattgaaaataatttaggttatcagcatgtgattttcattccacatgaggtccttttgcagtttacatggttttctaaattatattaaaataaaatgtcagaaagttcacatttttttcatgtttaacagcatcaatctttaaagaaaagttattgcacaaaggtctgtgcataaatcagccattctccgaagaggtaaaagaagtcattacgcctggttatgagagagagtttcatgaatgtaagagacataaatcatttcccactggagatcatattagtctagatggaagaatgtctgtttcttgatagtgagaaagcaacaaattacttttgtttgctcctgagtctgtggttgtccttgagaggtctgttagcatgttgactattgactattcaatattagcattataataacttacaatgatctgagtcacataaatataatctttcagttctctaaagattttactttttcctctctaatatctattcacctccaacacctttgcaaatatattattctctgggagttacaaagaaagttattctctgcaggaagcagcatttcagttgctctcaggagccaaccacatttcacctcaattctttgctcccaattcaacaattcaatattggattaaattcaaggctgtgaccccaaatagaatgagacctggatatttatgaaccacttgaccaggcattcttcccatgatttactccataaatcctttttagtttttgcagtagctttacaaatatttggaaaatggctgtgcaatgcagttttaaaaagtgcaatgagtagaggtagcttcttcacctggtatggtaaattgttgattctcttttggagtggaaaacaagtgttcttatttggatgcaaccattgcattgattagacaaccctaaattcatctttcatccatgacctgaaagaaattttgaaattcatgcaatatatacccgtagtggaaaatgtactttttgaatggattcctgaatgtgacttttaagaagagctattaagaagtgggatcttctacagaacagtaaacaggcatgaaaatatacaagttgataagatatggaactaccccaaaagaggaattaatagtggtggggcttggggcaggaggacagagagacctagccaaggaaggaagggctatattataatagagtacaaagtcctttagtcatccaagagaaggggcaccttctgcatcccttatgagtaagatcagagaaggtattctagttaacttttgctacataacaagccagcccaaaacttcatggcttcagtaaaaattacttgttttgttcatgaatctacagtttgctcaaggttcaatggggcttgcttatccctgtttcagttgatatcagttggggtagattgcctgatgctggaggattcacttccaagagggctcactcacatgcctggaaaataggtgctgactgtcagtttttcttcatgtggacctctccatggagcagtttgggctttttcacagtgtaagagttgggtcccaagagcaattatcctaagggacaagaaattaaagctgcaagcttctcaaggcctgccctaaaagcaagaatggttttgcttctcccatattctatttgtcaatcagtgacagagctctgattcaaggggatgagaacataaactccacctttccatggagaagtatcaaaaagttttgatgccatttaattaaagctgccatacaaagtttcttataaatgacactgagctgaatgaatactaaacagcaagtagtcattatcccagtcaagagaagttatctttgctcagaataccctttctctccttgtctacctggaaaattcaactcttggccaaagccctacctcttctcgaaagcattaccaggccttgcctctaagtgtacaattggagatacaccagtatactgatgtttttaaaactttaaacttttttctacaataaaacataaattaaataacttcccttctgacttaaaagctgcaaaatgctcatgacagtaactatataaattaaaattaaatcttaagcacgataaatacctctcgaatagcaacatagatgcttacttctttatttcacttctttatttgcttttctttgtctatagtttgccccaaaggtattttaataatatcgggttccatgtataccagtgtgtaccaattaatatttagaatatacctgttaataacctcatttgcatagccctactaatctgagcacagcgcagccttaagaaagtcttagtttttctcagtttagttcatctctcttctcttctcctcctgtctctcttatttcctatttctttttcttttcaagtgactttcaactaagtagaaaatgcatttcacatcactatgccggcctccaggctctgtctatttcattcacccaggaatgccctttctgaatgctttctctcatttagcagctatctattgaagttggacaaatgatagaaattcatttcttaaagagccagaacatcatcttgaacaagaagttaaaagaattcagcaaatcaaaagatgagctaatatgggtgaatcttagaggcattatgctaagtgaaataaaccagacacaaaatgaaaaatattgtatgattccactggtatgagctacctacaacagtcaaatttatacagacgtaaagttgaaggatgttaccaggagctggaggaagaagagaatgagggcttattgtttaatgagtacctgagtttcagtttgggatgatgaaaacattctagagatggatagtggtgatggttcaacgataataataatataatattaatgtacttaatagtactcaactgtatacttaaaaatggtcaagaaaatggtaccccgttatcctgatgtgattattacacattgtaggcctatatcaaaatatctcatgtaccccgtaaatatatgcacctactatgtacccataaaaaaaatttaaaggctaaatggccaggcattgtgggtcacttctgtaatcccagaactgtgggaggctaaagcaggaggatcacttgagctcaggagttcaagaccagcctgggcaacatggcaaggccccatctctacaaagaattcaaaaattaactgggtgtgggagctcatgcttgtagtcccagacacactggaggctgaggcaggaggattccttgaacccaggaactggaggaagcagtgaatgacactgtaccccagcatggtcaagatcccaaatcaaaaagaaatgattaaaatgatcaattttatgttgtgtatattttgccacaatacaaaaatggggaaaagcctattcgcttttaagtatccttaaaaaggcacagcttcttcagctaacagactctaaaactttttttaatagaagtattaaggtatttagagagtgcaaaatatcttattttaagtcaagaagttagggtcctgttcctaaacactagcctctgtaatcctggggaagtcagtgctgttggagatctcaggttgatcttctgaaaaatgatggatctaggtaaaagatatgtttctccaggtttacataccacggacaccatctttacttggaaactttattaaaaatgcattgtgtcagaagctctctggggatgggtcgtggaatctgcatatgtaaagagcccctaggtagttcttgtgcccacttaaatttgagaaccactagaccagatgttttgcttatggccctttcagctctgaaatttgaaaaaaaaaaaaatgattctgcaagacagagtctctgtgcttttgcaggataaagaaatgaagaaaataatacttcctgcttgtgttggagcatttttttcatttggtatccccatctccagtggctagccaatcaagaatagtattgtttattcttcccactgttttgaagatacaaaaggaaaagctaagccagatgacacctaaaggcttccattaccattttcatgtttttccctttgcataaaaactgtccatgcctccatcagagccatgatcactagtacaatgttacactctaatgactcatgacattaaattatatcttagcctaatatgaccaaattacaatatcagaataaaaatttcttttttcaggttgaatcccataacttaatccaattataatactggctgaatttttcacaattatgtctcagtcttgatttagggaatcttctctttatcataaaaatgcattttgttaaacatgtttcattataatcaatttctcaaaagtaaagttaatcaagagaaggaaaaaaggttttgttttgatttgatttggaatgtgtatgtgtgtttactgtattgaaatagattctgtctgaaagactgtatataagataaaaagtacagaagagtagtcagagagttattacccacccctgactgatggtgaatagattatctaagtatcccgtaaaaggcacaactccttcaggtatattttacaaattaattagtaactttctagccaaatttgtgtcttaaagacaccagctagaacttggttagttctagcaaagaagattattttattctgaaacaggtttttgttgtcgttttacttatttgaacttttttcttgaatatgtatttctttgcacataaaatatattgacttatgaatgtgattaaaatggaaaataattagttgattttagagagacagagagaggagaagagaagtgtgaaggagagagggaggatagaaaggagagagggagaacaggaaggacagagggagaatgggaaggagagggagagagagagacagagagagaggaatggagtgggtaataagcaagagaaaaatgccaatcatatgctttgctagtgtgtaaagtctgataacccaagggagagaggactactctggcctagtgaaacaaaggaaagagaaatatggtagaatattctcctggtgcttcaccaaatgtgacaccagaagtctgacagaagtcatgtcagcatttgagctccataaaactcaggctatcgacctaccatgtgagagtctcaaaatgagtttaggtaggggcagaggagttgaaatccagtaacatatgcaacagtgatcacaccaggattgcacatagaaagcaaattagtcctctaatagagacgccaatttgaaattcaccctctgagcaggtttttaagcacactcttcttttacttttctatttacaaaaatggaacaccaccagaaaaacaagaatttgaaagacgagatgagaaaagtaagttgtaattggaaacagacagaatgtgtacacaaacacacacacacacgcacacacacgtgcatgcacaggtgatgagagagtagtttgcctacatggtgtatctgactaagaagactttttgctctggttgtcttacaggaagtgactaaatctcatgatgtgaaatattttcttgcatattgtattggaaaagaaaataattttcccaaactccttaggggcagtgttgtcttataattcccatatagtatatgctcttcaagtaagtaactccagagttgagtaagacaagactcgtgactcagatggcatgctctgctccctagactagacattgcatcagtctgcctatactcacatccgctgttaaaggattgcctccagtaaaatatgtcttttaattccttatacaagaatctggaaaaaaaaagtaagattctctatttcttaaatttagcagcaggttaatcactgataacaataaaaatacataacaatcatctagcacgggtaaatattgtggcaaaaattacaccctgaagaattcagtcaaagatataagtaagtacacatcattgtcatgttccacaatatatcatctgctttaaagaaactgttatgtagctgtagtagatttaatcattaatcccatttcttctccaccttctgcaatcacaaccttaacaatgcctccttatgagtggaatgtacttcccaacccctagtcttaggggttggccatgtgatttgctttagcaaatggtaaatgagcaggagtgagaggtgacagttttcagcctaggccttaagagatctatacattcctgtttgtgcttctgctatcattctgagaacacgtccatctaggctgctggtctcaggaaaacgataaaagacatgaacagcagggctgcactagccattcacatccaggaaaagaaatgattgttgcataaagccattgagctttattctacattactgtgacaatagctaattgaaatagtaaatatactttggtttttcctaaatgcatattgaaaattaataatattagccatctgtatgataaaaatataaagcctatgttttattttttaatggttcactgccctaaataaatttccaaaaagtagatgttcccttgtctagtgatgtcattatattttatttatacatcataaacacactgtttatttctgctcatttttttgtaagtaacatgtgttaccgccaatcttgagatgatacacacacttctgtactaaattttggaaaacatattagctacccactccttatatcaaaatattgcctaataatgtgttttgttttaatccttcatgaatttccaggagaactgaactgatacttgggtttgtgagatatatgaaaatagtgaacatgaacttctggtttaacccttgtgatgataatggaatcatagctctgttaattactcttgtggtttgtcttcctagagataatcatgtacaaaattcctttccaatttgttatataatattagaaatacttccaaaattggcatggatttattgttatcatttgttggcacaatcattaaaacgaaacccataaagctagataattaaatgtttacaaagctatagtactcaaaacaaaaacactgtgaaaagagattttttaaataatagtttttgcatgccttttgaataattggattattctgaatttcttcatgtttagtccctgaatctaagtcataccgtctacataaaaatagatgtcagctgaagaaaaccaggcaatggatttgtcttgacgacaatctttttatatgttcagacttcatttaacattagacttgtctgtatttgaaattggtatttctttacatttctgaatttagggaaatggcacaagagaataacattaatttcctctgcattttggcctaatcaaatttgagcctttcaagagacacagccaagtcaattcaaagagacatatgaaaagactactgttaatgtatctttaaaatgaattagcggcatgaactgttgctaggtgagttaggtatagttgtagtttttagtaaccctaagagaagatgcagtgcattctaaaatgtcacaaggagtttgattgctcaaaattctgggagattggctctctgcaaggcttcttgatgtcattgttcctagaggaatgttgttccagtacctatagcgattgcagccataactatttatgtgtcattgtagccattgttattactacatgcttcacatacctctactgaggtctaaagaattagtggacttcatattctggagagaacacttgaagaaccaaacagaagtttgatgtgaatctgcatatccaccattattgttcataggttctcaggattagttgagtgatgccttaaagaaagaaagtcagatgataggtcttcctgctgcccgcaccacatcatgagtgttattcctatagaggaggagtaaagagtgggaagaaaatgaaatctgtcaatactgtgaatatataaataataaaagtagcagtaggactgattaattctgaatcatctttatgaaatgactggagccgtgaaaatgctcagtctgcacagctgattgagaaatgtatgcaatctgttgatcggaatttatttgtgaatgctctcttccagagatttatataccagagttcttaaaacgaattttgtccccatgaaaagaaaactacagatctgtaagactgcaatttaaaatggaagaaaacatgttcccacttgaagaacaactttcaaacaaacaactgatacaaaaaagtcaaaagctgttttgttttatataatagtttcagaatacttccagtcaatatataccttggtttggtgaaaaaataaaaagctaaatccttagatcattaactagaaatttttgtaaaataaataaaagccgtgggttttagtgcagtgatcccatgaagaggaatatattcaccattggtctcttaatctcagatagaatgtacatgttactttattttataacgaaagcaactgtgttgtgatattatgtataatattataacaggagaagtcctcttagctaactcagtaatcaataacattgtacgttgtgtgttattgtaaccaaaaactatgacagaaccccatttcataagatcagtttatccacctatatgatttatatttgaatattcatttcagtacttatgttgcttaaacaaagctactgtattagtccattttcatactgctataaagaactgcccgagactgggtaatttctaaaggaaagaggtttaattgactcacagttccacatggctgggtaggcctcaggaaacttacaatcatggcagaaggtgaaggggaagcaagcatcttcttcacaaggccgcaggaaggagaagcgcccagcgaagtaggaagagccccttataaaaccatcagatcccgctatcatgagaacagcatgggagaaactgcccttatgattccattacctccacctggtctctcccttgacacgtggggattatggaggttatggggattacaatttaagatgagattgtggggtggggacacagccaagccataccaaaaactctgttttttgtttttgtttaatggaaatgatttagaactttattttctgatgtttctttttcataaaaccacgacaccaaaatctacttttcactgctccattcaactagtagagaatatctaatctcttctcaagtatttctttctcaattatggtggttttagctaagaacagcttatggcatgcttttctaaataatattagaacacataaattatctgtacctggtattaccacattcattgctcattttaagatctcaattgatacattcaattcatatatatttaaaattgattcatttagagcaagagatacaggcattttaatgtattacactgctactaaagcttagcaaattattcttttttgtgcccacaaattatcatccattcatgtcctaaaaataaaattgaatttattatactttcccatttatccaaaaaaaaggttttttttaacaattgatgcagatacacattttcaagctaaaaatatgtgtgaaagtggcctctttctcatagtatttattttaggagtctagcaataatttttcttaggttatcagcacatgtcttagcctgaattatttgaattcagtctgtgtcttcaagttcagatggttatgtgatcttgttaagatctcaaagtagtgggaatgatggagtatacaacaacctcattgttttttatggcaactgtcatttactgaaggacataaggctagcagaacatggtcagagaaggaatcaaagtttggtcagccaactctgctccacagctacaagctgctagacaggcataaatttttccaaacctacacaaagggacttagggcccttggctgagagcgacattctaaccacttccttatttatggctggtggggtttgtacattttctcatttctgtataacatttcttgactgtaataagcaatgtattcattctgctttaccactttcactaaccttaacctcaatatatactcaattaagcaattgaaaacagcagttttaatcttttgacataaatgatttcctccgaagcaaaatgctggaaatcccctcaaatgcaccttttattgatgaatacctataagcaccacctacagtcgctggaggctgacaggaaccaaacttgatgataaccactgagctgagaattttcaactcactctttttccctgtatggttcttctagctgcattatttcccactatttaaagctacagctggtgaactattcaaatatttaaactttggagaagaaaatatcaacttatcacaaccctctttttatattctaaattcatatacctgtttggtacttaaaggaaaaatatgctgaggaacaggctggtcataagactgtatagaacgtgcatcttccatcctattgaggtgactcctagacaatgggaaaaatgccttcactcgacttgctcattaaatgtgaccgtagctgctaatcttttggcgctgtctcgaactttaattagatgtgctcttctcttgaaggttggaactacagtatccagagaccatagaatcacagagttgaaaacaaaatcttggaaatcattgaatccacttatcagatgagaaaaaaaaaataagcccatggagatagccattttaaaacatatcattctatttagcctccaatgtaaaacaatgagttactatgtttcaataatgttgatgttaagaaattatttgatagcttcctcacttggtctcctatattcctccaaggttactagttaggaagactgtcattcaaatttggagactacataagaagcagaaaaagcatataaagaggcacatgaaattggaacttttctggtaaaatcttctttcttaaactctcctcaaataagctgttggtggcaggaggtgaaagacagcctccaccctttagcacagtccgtacttgtcagcatttcccaggaagggtgatgtctggaaatgatagagattgtggaagcacattgcattatgggtcaagaatgcgaaggtcaaggagtggagtcttcctttacgaagtagtgttaactgcttggcgtggcattgttgtaaacagaagccaccaggaaggatcatccttaggagggaacctgtagatatgactgaaaacaagagagatccagttttaccactctggaaacataggtaatagaaagcccaaaaggtaccttatcacttgtttgttcctttctgtacaaaaggacttaaatcctttctgagcaagaaagatatttgagaatccaattttgttttaaacttgagcttagcattttggaactattccaaagaccacagaattcacagtcattagcataccacagcagactcttttcaaatattgcaaaccagaacagtctgcttgaaaacctggaaatacgacctagtgggttcaacttgactttttttatttctaacccttacccctaggcaattattgataactcattctggtacctggtatgtatatggactttgttagaagaatttgacaactttctaatcatctgttttttttcttttgcttgatagacatacatttagtagaactttactggattgtattgattataaaccacatttcagttcatatcagtccattttgctgcacaataaacaaccaaaaaaatttaattcagtggctaataacaacaatattgatttattcatggagctgcagtttggtagggtttggccaatcatggctggaaatggtttagctatgcttatctctaggccgtcggttctgttcgggtctataccacatattttcttctgagactcaagctgaagggacatcagctactcggggtatgacagagtagcacaaggcaatgacagaagcacaaacaacacttttcaaaatctctcctcttgtcacatttgtttatagcccattagacaaaacatgtcttgtggccaagcccaaagtcaaggggtaggaaaatactttccacctatgtgaggccatggctggagcgtgaatgtatgatactactagggatgtgaaaggattgaggccaataattcaatcttctattggagacaagctcaacgagttagttaaaatggaaggctaatatttactaactttgcaacccaaggaagagaaagcaggatctctctgacgatgacggaatttcataccctcatctttgaagttatactaaagcttaggaacaaccgtcagataggactgaattgctcccccttccagattcagcatgtgaagtatgcagcatcttattatagcagtagccaaaacagccgttttcttcaatttgggaatacaatgtaggtgtgttaattttcaattaagagttctaaacttattatctgcttggtagctcttccatgtgacagtcattccatctgactcttcatgttggcttttgaactaaattttaaaggaaccgccaaaatttaagggccatgtactttttataacctgtttgtggtctgggtaagaaaataaaaattatacaactgttctttttgaccagccacaagcatgtaatgaaaatgactgttttggctagcagatgtattagaagctttcaaggtgtttaaaaaaaaaaaaaaaaactggagaaaggagccagtgaattgacctcaaacaaaacaagaacaaataaacaaaacacttgtctgcacttccaaggaagggtgatatctagaaaagatagagatgatggaagcaccttgcattatgggtcacaaacgtgaaggtcaaggggtggcgtcttcctttatgaagtagtattaactgcttggcagggcattgttgtaaaaagaatccaccagaagtgaaacaagcagcactaaaagttaaaagatttatgtgtaaacctcatctaaggcaacagaagccatttctataaaatagtataggaccttttattatatatggtcctagagtatattaaaataagtctgtttgggtccatttgcagctcatttgaagatttttataggaaaaacatcctcaaaaatatcatactacagtgccttgatgcttttttctttttataaggtactgccagcccaaatagtaagaaaccgatatgatttttgtccatgtgaggtgtttaattgcttcccaaaatatggttattgtgtagatgtcactaacgaaatatataaagagcagtatttgggaaaatttattttaataccacctttttccttttttaccctaaaagtatttatttttttcgtagcatacactctgtgtctcagtatcattgtttttcataaaaacataaattcttaacagaaaatttcctgcaagctcccctaagcttgaagagacaaaggagatttgtaatgtagctcagccccaatcagggtaaaagaatgcagggctgactttatacttataactcagaaaaaggttatgcttcccgtctcttcacagagctagtctcttaattgattccgaactaggaacatgtacaagtggcccacgatctggaacagactggcggataatggaatattgagaccttgtctatggtcagccatattaacactggataagtctgataacactgtgattacatatgtatcaatatagtatgctgttaatatattaaaaacttatttacaacatgattattggacaactgttacagtacagccacatcaatcctatatcaagttagaccatgtcaactggttttgtgttgagacacctgtgtatggacatagtctgaacttttcatagtttgtgctaaatgatagcaatcaacatcggtatggcacttacagtttactgataactttcatgcccattaacatagtaccgcaataactctgtgaagtgctgaatttgtgtcctgtttcatgattgtatttgtgttgatatctcagtcagtcagagtcccaacaagaaacagatggcacattcagattagggtaagttgaggagtctttatttacaaggcactacatactcaggattgggcagggtgtagggaaatctcacaagatagcacaagactctaggactagcagcagcagagctgtcacctctcctagacctgaagccgttgttggggagagaggtttctcagagcccagaaaaaaagaaaaaaaaaaaaaacatcatgcagattttaatgccttgggaggagcagtggctttctcttaaggacagaatttgcctcgaaatgatactcagggaaaaagagatgaagggaatcaatactctgacccaagactctcccttctctgcagtggtttgctagtcctctccttggtcaaacccaaacagaaaaccatagggcataggagtctaatgatgtaatccaagtcagccccctggaaggtggaaaaagaagggaaaatggatctggatctggagggataccaaaaaaaaaaaaaaaaaaaaaaaaccatagttggcatgcttgtttattgatattttcttgcatgatataagaatccagataaatatagtaagaggtctattttactaacaattttaggcacctaataataatactccttctttgaatgtataacctctagaattggttcagaaatgtaactgtgccgttacaatttctattagtattcaacagtagattcatatccattcatctatgactggagtatctgccatttgctggttagttactgtgtaaggtactttgtaaggtatagaaatacacttggggtgcgatggctcatgcctgtaatcccaaggatttgggaagctgaggcaggcagatcacttgagtccaggagtttgagatcagcctgggcaacatggtgaaaccccatctctacaaaaaatgcaaaaagagtacctgcgcatggtggcatgtgcctgtagtcccagctactcgggagcctgaggtagaaggatcacgtgaacccaggaagtcgaggctgcagtgagccataatggcacaactgcactccagcctggatgacagagtgagaccctatcaaaaaaaaataagaaataaatttgagctcagtgacctacattctagtgcagaaaaaaatgaccatagttgattatgagattttaaagcaataaaccacatgagacatactaatgagctcataagatcattcagaaattgtttattatgaacacatagtactttcagtgtggcattaaacagagatcactgtccttaaacaagttaaaagcagaatcaaatcatctgcaaattaacacaccactaaactttaagcttcttgagtgattctgtaatttttaaaatgtcttcagcatttcagtgtcaagatagtgcaaactcagtaaaagcttgtggaattgcattaaacaaaaccaaaataaatagattttattaaaactatatacaattgtctttctaatcatatcctctccatgaatagggaagaaataattttaggaatttaaatatcttctatcttaatagttcctcttatttccctcttaagcaatgttcactccttcaaaaatatttattgagcatctaatatgtacttaacactgtgccaggtgctgtgaagaatgccaaggaaatagaatgaacttctaattctttggagttccaattaaataacctaaagttaaattggtttcggagagaacattatgccttcgagactgtaggcttctcttgattagaaagtcttaaacattttaagtaactaaacagattaaggagaattcaaggatgcctctcactagtaaatttggattagtctggcaaacttcagaccttaaatgcaagatttttaataattaaaagaagagagaaaatgataattacatttctagagtctatgtttaccattcagccttcttaatcatttcctaagtatatctggtgatcaggattttataactccagaaaatctttctatacatcgcataaatctcttcttttaaaaagctcttcaattttgtattttgttaaaacttaaaagcctccatgaaaaatgagacaaaagtcagtgagaggctgtagcaataaaaatcagatgtgattttcttttgaataacatctgtttttacagtcctttcatgttaaactttataagaatttattataaacagctttattgacagttcaatcctatttctaaaaggatttattttcccccaatggtaagagttttcttttcttaaacctaactagttgcagatatttcagatactacatttctcattgtgtaaggtaaagtttctgaccacctgaatatgacttgtagctcctgagaacaatttgtttagtaccgatatcatgcagtgacattggtacaaaggaattttctttatttcactgtactgttttcagttttattctatagttgttaaataagaccattaaatatttttattagtcttatttcctgtttaactaggtgggtttttgatctctgttcagtaaagcattgtgctcttcagagcaagcaattgaaaagcaaatagtgagtatttctactgtaaaagtttaacattaaaagatatacacacagccaggcaaggtggctcacgactgtaatcccagcaatttgggaggctaaggcaggagaatcgcttgagcccaggagttcgagaccagtctgggaaccatagcaagactccgtctctaccaaaaaaattttttaaaaaatagttggatgtggtggaacacctctgtaatcccagctactcaggacgctgaggcaggaggattgcttgagcctgggaggtcaaggctgcaaggctgcagggagctgtgactatgctactgtactccagtctaggtgacagaatgagaccctctctctctcaattaaaaaaaaaaaaacaagatacacacacatatatttgcgtaggtaactctaatttcatttcaagtatgttatgtaacaaccatttgtgtagtgcttgtaacagtcaatatgtaaatactgactcatcttctttgacaattctacctagatacttattagagtcccccttagtcattgaaaggaaggttaaaatcaaaagacgttgtttgccaaagtaatgaaagaaaacttataaacacaatgtatcatgtctggggctgaactaaaacccttctgatatgtggtattaacagatcatctttcatgacagtaccagttattagaaataaaatgattggagttattattaatactaacaatagtggtattcttaaaatgacttccttatttatcttcacctttatacattctactactgcttcaagacccatcttgaattcttcttccacagaacattctgcattaatttcagccaacattgatttctctttttaaaatttgtcttgcacagtgaattagaaaaccaggaattggaaaaccagaaaagcttattaagtaagaagcagagaggagagagtttcaacaaagggccattctaaagtggtctactgcggacaccatactgattatagttggtgattaaatcttatctttccaactgattataaactcctccagggcatactcttatattccacaagatgcttatctgggtgcagagcatgcatgcagttggtatttgctgatttatcaactaactaaatcttaacatattattattaacaatttaaaataaagttaaatgtatcactctccacccctcaaagccatttctgttctttgttttcatagcaccattattatttcctgcatagtattttttaaaaaccgtatttttaaaatttatatatttgtttatttgggtatacttcactagattgtaagcgtcacaaaagcagaactattataaccccagccactaacacaatgcctaacaaatagtaggttctcaatatttgttgaatgaatgacctacagatattacttcattatgaaagattttgctaagttgttttacatctattttatccaaaactaaagttcttgaggcaaagcctagaatatcttctatgttctcacaatgctctgaatcagtgcttctcttaatatgcatagcaattgcctggagagcttgttaaaacatagattacttagccccaaccccagagatgctgattcagtaggtcccaggtgatgctgctgctgtcagtctctggcgcacactttgagtagtagggctctaggatgttatatgtacagacacatgctgaatagtgggctatgtgcttacttgctggctaaataataaatgttctcactgagtcatagaactttgaaatttgcaaggacttttgctattatctagtctatggatagcaaataacctgataccgtgctatagtgcttgactgcatttaacctgcagaatcctcatgagcagcccagcaccatcactccaagtgaaactactctcttcttgaggttgtccaattctatcaattaaagatgaaaaccaggttctgagagttgaaatctctggacttcaaaggtccaacagcccaggtcttctcaattctcgttagtgtttcagcagctgaatacaaatttattaagctgtatcagagtagtatctgtcaaattggagtgtccataatatgcttaaacagagaactccattccaataacatgaactttccttatgctttattcatcatcgcttgaaattttgaattttgcccaaagaagtttataccagtacatgttaaattacatcatagccttctttgtataaatcttagagtagtttactgaagtacatcgcaaagttttgttgtttcttaggtgattttaattatgtatgtttactttcagtaatgcatcttttctccttcatcaatattatgttatgctagctgtaagtacaaaataattgagaacaaattatgacaaattgaaccaagccacaaaaaaaggagaaaccaaatacttttgtgatttgagcttttttcagtccttgaaactttaagaatatctgtctttattaacttttgctttttgctgatggtttctctcattttattatagcttatagcattgtaaattaatttaacatgaaaggataaaaacgttgcttttgaaatgtttctcattaaattatgaaaaaatattacactaaataaaagaaaggaatgcctctggtaccagcttctgtttgctcaattattgcagtacccaaagtgaattattacacagttaactcagaggcaatattattgtcattatattataaaatagatgagttgcaatcttcaaaaaaaaaaaacagcataggtcctttgaaagtgaaataccttttttccttgtgcttcatttaaatatatactgaccccagttttgtttttgtttttcctttttagagttcttgctaatgatgggcccaaagttatattaagaactgcaaagtaaatttcaaccaattactttattcaggggagtcattaaattgaggtacctctgaaattttggaaggaatgtactgccaattagccgaaagcactactcaatgtcctttctatggttataatctctctagtgtatttttaattgaagacaacctctatagaggaggtgagaagttgctatttattggtacttgttaggatggaatcaagggtgtggaagatattcatctatttctctctccagctcccccacacaaaaagaatggtgcttaatccatctgaagcatttggggagcgagggtaaagatgtaatatttaccatgagccgaaacagatcttcagaagtggaaaatggaagcatattgaagtccctcaactaaacagactttcttccatatggaattcaatgcattaatgttttcaaattctatagcttcaaattcttaatattttcaaattatgtgagcttatgtcaaaacatttaagtgagcttttaacaatgaggcaaatatttgaatcatttgtctacataacaaatactactataaagcatattaaatgttataaaaatcctaatatactaatgtaagctattataaagtacaaataattaaacaatatttatatgatcaatgttttataatacgataaacacattaaataattaaaaactcttccaccgtgcaaaaatgactaaataaattgttaatttctaaggctttttgagattactgtgaaagggggtatagtttcaggaaaggtgaaacttcccttcaatgtgtaaaccattaaagaacataataacctactgagtgtgggtctcaatgatatgccctggaaagtatgggcaactactccacacccaattttgtctttatatgataaggcacagcaaataattataatgcaatggataaatggtaaatcccaccaaagattaaccaatcagagcaggatgaaaattctgagtttggaaatctattggaagatttacagattagattaaagtgcccagtaaccaaactatcaaaattatatggcttcagttaattaatgatttccaaggtttttagtatactgtattacaaaacacattaagcatcttaagcattcaaacaacatttttttgatgattcagaaagcatcacaaattgttatatcagctgataataacttaggtacatatcaattaaacttgtattatagacacgcagaattcttcagaccagaagtcgaaagggcttctctagtttgtttatgctaagttgtttagagatgacataactctgagctaatttgtctattgcaatggttctcaaaatggggggcgggggatatttttacctccaccaagtggacatttagcaatatctggaggcatttttaattattattactggattggagatacaactgaagtctagtgggtagaggccagatatggtataaaatatcctacaatgcataggatagccctccacaaggaattatttaggccaaaatgtcagtagtataaaaattgagaaatgctagtctaatatagtgtttactcacctttcctgaaactatgtcccctttcacagtaatctcaaaaagctttagaaattaaaaaatcgtttagtcatttttgcatggtggaagagcttttaattatttagtgtgttttatcttatgaaatgttgataatataaatattgtttaattatttgaactttataagagcttatattagtatattaattaggattttatttaacatttaatatgctttacaataatattcattatatagacaaacgttttatttttttcactttaacaatgatttttaactctaattacataagaaaaagtatgagttaacaattttttaaattacatgcttggtttgagggccaaatacacatgaaaatgtggactaaaatttaaaatcaaataaaatctataaagtcgaggaaaaagctacttttatgacgaggcatggggaattcttcatagtttttgggttttatcagaagttagctattttttttctttttgctctgtaaacaatcagataagagaggctcaaatgacattttcaagtacatcttaacaaaatacactttgagcatcaattgagtaaagtttcattcttttgaaactttggttttcacaagatttcctgagagttttattttattggtgttctgtgggacttgggcatcataattcttacaaactactcagctcaatctaatgtgcagcgaagctctgggaacttttgttttgtctagtatccagttggaagattctatagctacagagcttgggtttaaaccccctccaagtctttaccagctacctttatgaccctggcaaattacttaaactgtgtgccaccattttctcctctgtaatacggaggcaataaaaatttccacttttagattttctatatgcggtttacaaattgacttactctgaagatcatctggagtaaaatctggagaaatatgatcccttataacttcttcaaccctttatatatttcaacatgagtaaccaatgctctaaatatggatataaattataagaataaaaaatctaggactattataatggtctaaactctcttcatagctaaaagtgttgagtaattaaaccagttgagcagctaaatcatgtacacacttctttgatccctcccacgatcatgtatttggcattgtaatgaaaagatatgtttattttcgagaatagacataactacctttaataatatgatcacccagaaatttttacaaacccctggaaaatttcatgaatatcaggctgtgctcataaaaccttagagatgagatcacaatagactgggtcaacatatagtaatgagcaggattaataaaacctcagatgggcatttacaaatgagtcaaaaccatgagtataattaaataattgtagcaaaaaaagagccttgggtaatcctttcagcaaacgtaatcgaagtgattgcatttagaagacaaatatttaatttggtgactagaaggtcttttattattccattatgtctttgtgtgtgtgtgtgtgtgagacacttttcaaggtcaatttttacttataaattgtctctaattaaaaattgacttggttattaaatcattgaaaattggccatcatcaaattcctcattaaaatatttctatgtgccatatatatatatatatatatatagaatatatatgtagaatatatgtatacatttatttttactttttttttactgtgcctactagagaaatttaaactacatatatgtagaatatatgtatgttttaactagacatactgttaagtacactatacctaatatttggcaatattaataccatctcattgagaaacctggaatatatgcacattttggatgtctattatatgttgggcactggactagtcattgataatacagagattagtaagactcaggttgacttcagccatgttgtcaggaagcacacactctagtttgggacagcgaggagaaattcaataagagaaatatatataaggcataatgctctaggagaatatgcagtggataactgcccaataggaccaggcaaggctttttagaggaggaggtggcatttgagtcaagtgttaaaggctgaatggaaattcactggttgagataaactccttaggaggaactactttaatagaacttgccgttagtcctgaaataaatggtgtgcaaaatcattaccatctgtcaattcactcagtctactttgctcttaacttcagaaaaaaatcagaaatacaattaaaacatttgagcctattttactgtcttttaaaatgagttaattcaaagaggaaattaaatataatgagagagaatctcccccgaggattgggggctggggaaatgctattgattctttgcttgtgtttattttctctcaaaaatacattatgcataaacttgatgatcaaaaattcagattattacatttctaaattggcaatgcaatttattgcatcatacatcaatcacaaaaatgctcatcttgctgactttcataaacttctaaatgaacaaaaatgcaaaaatagtttatactatattacactatagtagatttgttaaactaaaccagaacaatggtccatgaaaaataggcctctgactccaaacgctcacaccacaggatctctctgagatttttgtgtcatttcaagtcagagaaaattgtctaataaattgttggcttgtaacaatgaaaactaagatatctgtggggctattcttgttctcttcattttactacagcagctctgcccagtagaaataaaatgtgagccacatatgtaatttaaatttctctagtaggcacactgaaaaaataaaaataaagaagtgaaattaatttcaacagtatgttgtatataacccaatatacccaaaacattgtcattttaacatgtaattgttacaaaagttattaattagattttttccgttaagtatttaaaatctggtaagttttactcttacagcgcaactcagttcagatcagccacatttcaagtgctcagtagccatatgtgtctagtggttaccatattagaaagtagtttgagagatccacattaaaccaaaaggaaaagaacttccggcccttcactgatgagtcactcttcactgctaaccttggaagcattcccaaatgtagtctacagagtttaaatagtctatcttaacatctctcagggcttcagtcttaatgccatagtatttttaaagaatggtggatattcttttttacagaacactctgtaagagcaattagaagtttatgatgcacgtaatgcaaaatacaggtcatttcccaagcctattttaaaagcgcaaaaactgtagtcatttatcacccctgagaatgttgtcttaaatgtcttggtttggatattggtgatgtgagaactttgtgataagaaagtagtctttaagaataagatatcagactaaaattcatatctagaatgaaagtcttgtttttaatggaagattaagagcaagtctgattcagatcatgcatggggtacactagtctaggaaaacactagtctgaaaatatactaaaagttacttcgcaacttaacaagaaaatgtcttgtgggtgatgtcgttcttgatttttaggcaaacctacctacctttgcaaagcagctgggacctttttgcattggaagaatcatttggagcacaaacaaaattagattatcaacactttggaaaacaactacgaatgagcaatcagaaacctgaccttaagattacttgtgaattgtgaatcagcaaaataaactcgattgttcattgctaagtgtatttcaattatcaagggccttctagattataagtagtcttttttttttacttagtttacaattaagatgtgtggtatttgaaatacatttgccacagggagaaatataaattataattaatttcctaggctaattcaatttatgacatacctatatacattatctgtcatctataatttttcccttattgtttacttcccactggaagaatgaaaatggaatattattacatggcacatggcttgatacttttacaaactctgacaattatgtatttattttgggaggcattgagtttatttgttttatttatataaatttatgaggtacaagtataattttgttacatgcatagattgtgtaatggtcacgtcaggccttttagggtatccatcaccttaataagatgcattgtacccattaagtaatttctcactctcataaaattctaattatgtgaatttaatttaatctatttaatgtgttttaggcaaatatagccggtactataaacagttgattttaagatatcattgcttacattgagactaagtaaaacaaaatgggtcaataaatgtcaatctagataacaatgtcaactaaataagaggtcaaacatggcagtatttttgaaggtgatctgtgaaagtgattatagcgtttacactcatggaaaatgccttcagagtttcaactaagaatgccaacagctcattcctttatcctgatgcatattgtcttccttctcacccccagttccttcttcccctaacccctacccgctttcctttgctgattttgacagaaataggacccccaataagtcagggagatagcaggaaatgggataggatagaacccggaatgatagaatagctgagcctgaaggcatgaagaaaggctcctcctgacatctaaatggagacctaagagatgggttggtcaggtagggggaaggaaacatgaggagtattctctaagccaggcaacatactgtgcacaagtctgaagtcatgggaaagtgattttgagaggattgctgcttggtaaacctagagtttgaattgggagagatgaagctagaaagttagtaagggtcagattttttttttttttacttgcatgacaatggtaaaaaccactaaaggttctgtgttaagcagaggagtgacttcatttaaaaaggtaaattggattgaaatgaagggcataaactgaggcaaaaatatccttcgttaagttattgaagcccagttgaacacactggtggcttaaactggagtattggtataagtgggggaaagaggttaatagattccaagttgaaaaaaaaaaaaaaaaacatagactttgctatctagtaatggattaatatacaaaaggaaaaagtaaagtttctactttttggacagctagaaaccttcaccgaagtagggaacccaagacttagattatgttgggaggggcagggtattttagttgcacagggatttgctttacagaaatgactgaatgacaatatagagagatcaattccattaaaagaagtttgattactcacagttctcaagggaagagtacatactacgccatgcaaagccatgcaggaaaaaagttccagagtcggtcagcaggcagaaaaggaaagcacagcccaaaccctttattgtggtttccaaggaaaagaaatgagtgaggtagaataggcaagtctgagcaagtttaggactggatagttcaaataatttccaaaatttcctggctgtaaaagtggtctctggttgtctggtaccaagccctagggtgaggggaaaaagttagggtgggggaaatattggtttggtgtaacaacagttagatgaagaaggtagttggggatacggactttggattagttggtttgtataacgaaaagcaatccaacaaatccacaagggagcaagtttacaagttatttgctatctttaggaattagctagccctgggaggggcagtctctccctggccttccaaggacctcaagatgttcaagcatccataaaatatggaaattttttaaaaacattataaatacacagagtaaacgctgggcatgatataggacagtggttctcaaactttagctccactggaatctcctggaaaacttgttaatatgcagatgaccgttttacccttaagcttctaattggggaggtctggggagggcacagataatttgcatttctacaaagttcttccatgattttgatgccgctggtgagggaccaggctttgagaacactgatttaggacgtgtcctgtttagggaatatccaaaaggcggacaagttcagggaatattcttgggcagttggctgtgtgagtctgaaattcaggatagaatattaagctgaaataaagatttgggagcttatctacagtcaaatgataattgaaatactgagagtacggggggagagaggtccatgtaccaagaaaagtgaaaatgactaatcccaagcctcgctgaccattgagaatggagctaagtgagaggagttaacaaagctgacccagaaaaagtcataagggccttaggaggccaaggaaaaaaaatacattcactgccaacgagaggcacttacgaatggcttgactggctttgccagcatgcatgaactgcttcataattatttgtattgattacagtaacagatacatattttaacaagcaacttaagtaatacaactgatttttaattatcttgtttaaattgataaaggttgtatatattcatggtgtacaacatgatgttttgatatacccatacattgtggaatggctaaatcaagccaattatcgtatgcattacctcacatacactttatttgtggtgagaacacttagagtatactcttagcaagtatcaagtatataatacattgctgttaactatagtatccatgttgtacaataggtctcttgaacatactcctcctgtctaattgaaattgtgtttccttcgaacaactgatttttttaaataaaaaacttaatacctgtaagttagaattcttaatggtcaccttaggagcctatacaattattcctacgttgttgttactattctgtgtctttttcttttttaacatctttaaaggtatcaaatttttatattttgaaagtagaatttattttttgtcagtctaaaatatttttatgttgaacaaaatgcatgaatggtaaacctagatgcaatcaatttttcaaataaaaaaagtagatacccatgaacatttcttttgtaattgcaaactgtcttgaaaggcagtttcaaaaagagtttagttcctaaattgtaccattactcactgcgttaaaatgcaacattcatttgagcgtataaccttttgatcaatttgtttttgatgtcttgttccctgagagttgtctcaaatagatacatataaatatacacatatctcagattggctctgagaaatgtcttgattcaaacgttcttgattctaagattcatggtacataggaactgtatggtgacaaccttgtcagcctatctttagagtagctttggattctattcagaacatttcccaaagctattctgctatcaagaatataaacaggaatagtcaagggaagctttttaaagggcaacattttcatgtaggcatttttctcacattgaaaactagtttactaaatgcagtgtattaccttctcattacaagaagtctttcacattagtataaatgcatatggcagttgtgccagaaataaattgcctctcaaactagcacatggaaagaagaattctgagatttagcacatatgtagcttttaaatagtatactctgtttcaaacattatgtgttagtccacgttctcttcagccattttcagttgcatttttactttatattcctttgtatatttatctttgctaatcattgtcctgagattcctttagctcttgaattctacgtttttaattaatagaaaactttctttttatttttcccccgacatagttgttttctagaaagaaacagttataggttataaatccaacactttagggccgacttgaacatgcatcaaagctactagaggacttgtagaaatacagattgaatggtcccatgcctagagttttacattcagttacagatagggtaggacctgagaattcacattgctcacaaatttccagttgattttgatggcattggtctagagaccaaaccctgagaaccattaaaaaacaaacaaacaaaaacaaacaaaccaaaaaaaaaactatatacagagattttcttcattggcttttgccactgaagacatttagatgaagagactccacaaagtgtaatcatttagttatgagaggggcctgataatttgcatttctatcaaattcccaggggatactattgttgctgattgagaaccacacttggtgaaacactaattaaaataccattaaaaagcaaaaacaatttaggccagcaaaacctcctaaagaatgaggcctaaagacttattttgttttatttttgccagaagcttcttatgggcaaaattatcaccaacagagctgaggttcaaacttgtgttcatagcaagcaaaagggataatttggaaaaaaagctgaggttagctttgtggttggtttgggagtgggaatgagtagggaggaagaaatttaaaaaaaaaaaaaaaaggaagaagccaaatattaaattgttcacagggcgaaaaaagagaaaaggagtaactagaaatatcttagactggttcggcaagtcgggtccctcgcagctaacagtggtcccaccctctggagtttatatgtttacattctttttttttttttttttttttttgagacagggtctcactctgttgcctaggctggagtgcaatggtatgatcacagctcactgcaacctccacctcctgggctcgggtgatccccccaacctcagcctcccaagtagcagagactacaggcaagtgccaccatgtccagctaattttttgtatttttttgcagagatggggtttcaccagttgcctaggctggtctcaatctcctaggctcaagtgatctgcccacctcagcctcccaaagtgctgggattacaggtgtgagccaccgcgcctcattggagtttgcattctagttgggaaaatagccaataaatttgtgacttattttcctttaaaaaaaaaacttattctggctattgtgtgactataggatatggaaggtgcaagagtatgaggctaacaccctgttctaaattccgtctcctctgagccttgttctgtcaagaatctcctccttctatactttttaagtcaccttcctactgatcctttgctgtcagcttaccactctggtacccttcattttaacaaacaaacaattgtccaagcttaccggtgctgctccttcacccctccacctgtacctagtgtcaattctctccctcttctgatggccaaactttgtgaaactgtagcacagctccatatgtgttcctgcaaaggacatgatctcattcctttttatggctgcagagtattccacagtgtatatgtaccacattttctttatccagtctatcactgatgggcatttgggttgattccatgtctttgctattgtgaatagtgctgcagtgaacatacgtgtgcatgtatctttaaaatagaatggtttatattcctttgggtatataaccaataatgggattgctgggtcaaatggtatttctggttctagatctttgaggagctggaagccattatcctcagcaaactaacacaggaacagaaaagcaaatatcacatgttctcacttaaaagtgggagctgaacaatgagaacacatggactcatggaggggaacaacacacactgaggcctgtcggggggtggggcgaggggagggagagcattgggaaaaatagctaatgcatgctgggcttaatatctaggtgatgggcaatagcaaagacttggaaccaacccaaatgtccaacaatgatagactggattgagaaaatgtggcacatatacaccatggaatactatgcagccataaaaaaggatgagttcatgtcctttgtagggacatggatgaagctggaaaccatcattctcagcaaactatggcaaggacaaaaaaccaaacaccacatgttctcactcacaggtgggaattgaacaatgagaacacatggacacaggaaggggaacatcacacaccagggcctgttgtggggtcgggggaggggggagggatagcatttggagatacacctaatgttaactgacgagttactgggtgcagcacaccaacatggcacatgtatacatatgtaactaaccttcacgttgtgcatatggaccctaaaacttaaagtataataataaaatatatatatatatatctctaggtgatgggttaataggtgcagcaaaccaccatggcacatgtttacctatgtaacaaacctgcacatcctgcacatgtaccacggaacttaaaataaaaattaatcatagaactttaaaaaaagaaaagaaaatgtagcagagctgcctagctcaccttctttacccacagctcacttttcagtccatttatctggctattactcctaccgtgccaggcaaactgctctcactaagaaaatcaatagcctaccccctgccaaattgcctgactcagcttctccttgtaattttctcctttagttctctaacaccctcttccccaggttttcacctgacctgtctccataggacatttgagtctctttcctgatgattcatcctcagcctcttccataataagtatggctgctccccagatcctaccctcagcacttcttcactttccatgccacatctcttctgtgatctcatcttcatccacggctctaattagtatctataagcagatgactctcaaagcatatgctgcctatgtacccctcttggccattctacattgacatctgcaactccccagtgaacttctatatttagaccacaggactggtacctgctgataagcacaggtagggtgtactgagtagtgttttctctatttggttgggcttttgctaaagcagttgtcaaatattttgagtcttactcatggccacagacattttaacattagcatgtcccaaactgaaatcccctactgcctctattctctatttcagaagatggcaccaccatctacccaattatttaagctagaaacttctgattctggtgagacttctctcttttatgcatatgtctacactgacacaaaagactgcaaattttacctcctaagtctgtcttaaagcagatttttctctatgattctctatggtttcaggcccttatcactgtgaagtcaagcatacctgattcgaatcttgtcaccgttggcaaatttttaaatctcttctagcctcagtttcctcataaagttttctgtttcttagggtgactaaagggcttaaatgagattaccatacagagagtaaggtacataaaatgcaattaataaagaatagtcactataactgctgatgatgatgctattactattcgtatcctagaaaactccggtaacttgttcactggtctttctgcatctagcatcacttcctcagccagagttatcttctgacatgaaggctgatgccgtcacccccatactcatgtttgaaattcttcaatacctttaagataaattcccacctccttggtgtagcatgcaaggtcacacatgacataatctctccaaggccccatttcttccactctccttgagtgatatatgtggcagaaaatttaaggctgcctggatattatccaccttacgtcccaatacttccatctgccgcaaagaccttctacccaacttcccatcctcaacgaattcttattctttctttaaaaataacctcaaacttcagactagacctctggtccatagggcattacaaatctctcagtaagttgtacaggatgaacacgccccctaaaactttgtttcagatatttcaatttttattttattttattattattatactttaagttttagggtacatgtgcacaatgtgcaggttagttacatatgtatacatgtgccagatatttcagtgttaaaggtttaataatcacatttacagaaaaggaattagctacaaaatggtggcactggtatacaagtatgtaaagatacagtgcttacaatttaggattattgttgtcgatgttttaatattaaaatggctaatcatacagcaaagtcgaaagaaatttacggtcaacatctgtatacccagcacctatactttgccattgaaattttactatacttgatttattacatattcatctatccatccctctttctgtgatcaatttttaatattctaatactcttacccttaaataataagttatcttttcaaaaaataatgtgtttttacatagatgaagcaaaataaacttgcccttgataaaacaatatgcactgtagtgccttctaattcagtgcattgaagtatccattaacaatataaccagagaatataaaacatgtttattaatattccactgtacctgattagatatagaccattaggaagagttattataattaagaatctaggtttgtcaatatagaaaaaaacctgtgttttttatcccactggaatgtcttgtgaggaatattgttcccctttttctaaaatttaactttgacctttattttgttaatgcaccatgggttaagccacactacgacatgtgctaaatagacctggaagttttcaaactaggtttttaaagtgtatttgacattaaatcttcataacaccttattgattaatttaaatccattaccatggtaaggaaaattcgcagacaggcaggtgaaaattaaaatagaaacaaaacaacatggtaagcaatccttccccccaagccaatcagcatgtagtcagtgtgtccttttaaattagcaaggcgcagcttcccataaagtcccagcttgattttatatgctgcaatagtattgctaaaataaaggagaaggcaacttttctctataatttttttctagaagttttcacgcagcttagtatactgcaatgaccacattactcagttccagaattagcagcattccattgtgaatgacttaattcacattgtgattactcatttaacaacattcttgagggtttacaatgtgcaaagcattacattaagtcgtgtgtggcagaggttctcaaatgcagatgatctgtgaagaagatttcctcaataagcagagaaatgagaactataaggacagaaagagagagagagagaaagagaaattatttaagcttgtagcttgtcatcctcctttcttaggacagcctaccatttaggctgagactatgtctttctgattatttcttgtggttgaaataccccttccttaacaatatgatggtaacagtggatggtaaatcttgttttgttttaatagtttacctggcaaaagtatcattttatgtctgtatcagttatatataatagtatatcagtccattaccaaaccgcctcaaaactcagtagcttaaaacagtaggtacttcttgagttcactaatttgtgggctgatggtttacattgggtagtttatctgctctgactgggctcccttgggaatctggagggtagctgagagcttaagtgtctgaaagtggctgggtcaacacagctctatcgctcacatcttgaacatccctccagcaggctaaccagcccgagcaagtcctttttgtgaaggctgaggtgaagagtggaagtgcaaacatgtaaacaatttgttgagcccctgcttccattaagcctgcaatatccgattggctaaagcaagttttatttccccctgtggtaggcagaatcatgggcccctcgaagatgttaatccccagaacctgtgaatatgctgtgctccctggcagtagggaattaatattccagacggaattaaggttgctaagcaggtgactttgagatggggagattttatggactattcagatgggcctaatctaaccacagggttcatataagtgaaaatggaagcaggagagtgggagtcagagagatgaagatagcccctgctggctttgaagatagagaaaggggccattagccaaacaatgttggtagcatctaatgctggaaaaggcagggaaatagattgtcctctaagcttcttcagaaggagtatagccctgccaacactttcattttaatccatgaaacccatttcaaacttctgacttccaaaactataagataatcaatttgtgttgttttaggccagtaagtttatggaaaattgtcacagaagcaataggaaacaaatatacgctccattgttcaatcttttgaataacacatatactattatttacttaatgtttttcttaaaatcagctcattttgttttctgcttttagccttaagtgataattcccacaaaactgtagtctgatgttgcagtgtttttttccttaatacagataaaactaaatgaatattaaaatttaaactataagctgtttatctgtgtaacatggtaaattggctccctaccactactgttcagcaaaccacattttgggaaacagcgatttaggtggttcaaaggagcaagtgattgtgcaagaacaagaatttattagagaaagaagcatttggccaatgggtagaattgttggcagacaaaggtagaagagaaagacaaattattcagtatggctctagcgaactctttgcacttttatcacacaatctgaagcttgctaatcttgacatgtcttaatgttgttggattgctcattaaactggctgaaatgttcacaaagactctcacctgtcttctggcttaagctgagatttatcacacttcttggaaacatcttctggtctccagatctccctcagctaagctatacagtcagtctgttctgtaagaaagcccaaacttctctgcagtgttcctcagtctttttgatatcatgatgaacagattaagttgatgtgttcatcatgatatcaggtaagctggccgaagactctaagctgcctaaccatcccagggctgagagggatcgatatctgaagtacctataacccaatcagggcatgtgccttagcatacccattggaaagccctgttttagagcctttatcagctgtgaacttattgaaggcaatgattttgtcctgttaatcattctattcataattttcaacaagatacgtggttgttgttaataataattgttggttgaaatgaagttaaataaatagcaattgacttttccaaggtgacgcattgcacagatttatttatcttccctttgctgccctggagtaccagttgtatctaccaataagcttcatttataggccagcctcatcttagtttctgaattagtctaagtggctctggtagcgcatcaaaaatcttgctttctgatggtctttgtaatttgaattctgtgacttacagacttggtattcaatatgtcaggaataaacctggggtgtgcccaaatggtttgaaaaatcccagccttcctgatttcctctcttctctttctcccctggccaccctaatagtctgatagtttttgttatttggatactcctaaactcttggcaatttttcttacatctgttctctacaggctgtcacaagtgagtggaggcaggatggcatgggctgcagtggaaagaccaagaaaataagttaaaagccctgggttccagtaaatgctctgtagtgggatttagggcaagtctcttaacttctctcagcatcaatctccgcatctgtgaaataagattaatgacacctgtcttgcctatacttcaaggttgttttgaggttcacatgcattttccaccccatatagcctataaatctctgatgcctacagataacctataatgttctccagtaagtttaatatttccaggattttaaaactcaatgactagcactgctctgatctaacataacatattgtgtcaatatgtgtgggagtctctctggttgatgttaatggaagtttgtatagtttacctaaaatagaataaagctataatattaatatatatcatcgatgtgttttaggtgatttttttcaatataaaggcaattttggttcaaaattaggtagaacatttaatttttactaatttacaaataaaatgataacatcaaaagggccccttcttttaaagataagttgtaactctcacattgatagtaatctgtcatttaggacagggaatccatgtagtttgaaaattcattggcatcatggagctaaaacagtggctttttaaacatgtcgatttcagttttctttgttttacaagtcaagtagtgatattactgggtacatatgaagcatactgattgaccaaaaaatagtaacaaattttgtaaacccttcacttaaccattattcacctttcccagccacataagaatcctttctctttgtccttagattaattgcctttctttaaccttttcaattctaagtccagacaagctgctgtggttctttaaaaggccacacaaaataagtattgtccagtgctaacactctgaaatgtgatattgtaattactaccaagtgaacattaatcactactagattagaatggaattacctgttatattcacattaatagcaaatgagctttccctgattgatgttgttataatgaatacaaaaggaattaatagtgatctggcactcaccaaaagaggggtagtcattaaggacatgccatcaaaaggcgggtaatactttacaaaaaacaagtattaattaaagtaatatcacaacgaatgcctattgaataacttatatccacattacaaagatattatatggttgcgattaatgtgattgcaatacattttgtaaaaattaataatgactaaccctttaaaatatttaggaagcagatatttgtttatatttgctaaatagctatgccaactctttagcttttgtgagtgacttctagcataggaacagtgatggataatatgaagcactatatataataactcatcggccgggcgcggtggctcacgcctgtaatcccagcactttgggaggccgaggcgggcggatcacgaggtcaggagatcgacaccatcctggctaacacggtgaaaccctgtctctactaaaaacacaaaaaattagccgggcgtggtggtgggcgcctgtagtcccactactcaggaggcagagcttgcagtgagccaagattgcaccactgcactccagcctgggtgacagagtgagactctgtcaaaaaaaaacaacctcatatatttttacttgaaaacatacattttgcctttaggatttttacttgttagaatatcctaaaggacctataattgtaaatgtaaaattgactaatttctgggttttaaaaaaaagtatttgaaagctgatctgctgtgaacattgaaccagatgttaagaaaaatgctagtaagaaatgagacttgggagcaaagaagcagaactaaacttttcatatatggtttctatggagtaattgagaacgtacatattaacagggatacaaagtcaggccctctcattcaagatgctttctgtctttaaaaaaaaaaaaaagtaatttttgaaattttctgtggcaacagtcccatagcagaaagcaaagagttttgaattaagtgatcagaatatcattcttataattttactacactgaacattatttagaaaattttgaatgatattaaaaccgctataaaacatacttgcctaccataagacttaggatttaagccagattaaaataaatatttatttagaaggatgtatgtaagaactggtgaaatataaatgaggtctgtatttgagttaatagtattgtgccaatgtcagtttcctagctttgatgataatgtactatgggtatttaaaatgctatcattgggagaagctgggtaaaaggtgcgtgagaagtctctgtactatatttgcaagttttgtggtcttaaaccatttcaaagtaaagttattttagaaaatatctaaatatatattttagaaagtattatctttttctctgtaactagtggctaattagctcagtctgaaagagtatgtagaggtggaactgctaaatatatttctgatctagacttacttgatgatgcttgaattagtaagtgaatgttatgtgccaacatatgctatgatacatataaatatataagattaaatgataggagctaattatttcttggcatgttgcagtgggtccatttaaaactgtttatgtaggaaactactgtaattataaaaatgagcacagcccaacagcccagtatattagttgaaatataaaaggcgttgtgtccaagatttgaaatgccttacaataagcttggcacttacttaccttcacacaaagcagacacattttattgtgattttagtgttccatattatatggtacagtaccaaaggaaaactctaaaatatgtactcaaaatcctgatgtgcccttctttccaaacaggtggcaccacaatgaatataacctttagagttaatatctgaggacaaacccagcagttacaccagcatgatttaggtcctgctgttacaattattattattgtatttatttcacaattaagttgcagagttgagctcgatatagttccagctgtggcttttttttcaactgtctcaatagttcatagatatggccaaatgttcaataatagtgaaagcttatagtccacatattatttctgtagcaccaattttatgtgaaaaaatgatttatctaaatctcagagaatttccataactagttttgttatacatctacaaaactaagttaaaagaacagagcagactttttaaatagctagattggccaaatccacctcattatcatcaagaagatactgaaacaccgtgtttatacaacaagaccaggcattgtaaaagaggaggaaaggtagagacaaaatttatttagccctcaggaatctttcattctgatagtgtaaatttgacaactttagagggacttattaacatgtatcttatatatcttgataccgaatatatattttgtgattgcattagagccatgaaatattacacaggtcatttgaacatagcattttcatagagaaggtgacatttgcaaaagattaggagaaaagtaactacgattagaaaatcgtagttttattttgtctcttgagaatgaattgatgttaattttatgtctgatttggccaaatacgatgtggaatttgctaaagactgaaaaaagaagagacatcaaatagagggttgcaagttaacagaccatgttataattaaatgagggaaaaaaaagtagagttgttaaactcccagagaagtcatttccccttggtttggtgcatttcactttggtggtgaagtaaatgaccatatgggcacttttctagctctgtccgcaggtagcactgggtatttgtggacaaattacctagcttttcatagcactagtttccttgttgatagacttcagaattctaaattccattttacatccttatttctatgtttaacttaaagataatcctttgcagccgggcacagtggctcacacctgtaatcccagcactttgggaggccgaggcaggcggatcacgaggtcaggagatcgagaccatcctggctaacatggtgaaaccccatctctactgaaaatacaaaaaatcagccgggtgttgtggtgggcgcctgtggtcccagctactcaggaggctgaggcaggaggatggcatgaatccgggaggtggagcttgcggtgagccgagatcgagtcactgcactccagcccgggcaacagagccagactctgcctcaaaaaaaaaaaaaaacaaaaaaaaaaacaaacagatcatcctttgcactggaattatcctgcagtggaggatagtaatgaaagtgtagactctgtttctgaacactagctatgtcactttcaaactgtgtgattttccttcaagtttctcaatcactccaggtctggtttctaaatagaggaataggagtagagattaatattgtgaagattaaatgagaaaacttatataaagcacttagtacggtgccctgcatattgtgaaggcttggtatgttgttagtagattcattttattatcattattaataatactgaaccctggctgttgggggaattggttctatcctcctgtctcatagtcaaaataggttaaagggccttctatctcttatttctggtggtgcattataattactaatagtaatgtgcttcatttgtatatgatcctttatagtttacatggcgctgttttatgtaatcttactaaaatttcaaaaataattttaaaaagccagaattcacaagaatgtgactcggagaagaagtagatgtttttctaagtagatctttcagtttaactgattcaaattttctcatgtttcatatacatgattatcatgtcttttgataaacagaatgttaaccagagtacaaccttgtatgaacatatttattcagcttagaaaagatccagaggtacaaaatctagatcccagtgtagaagttagcatacacagtacaatttctagtatgtccataaacaatatgttaaagtattagtttgagccatataggattgccaatatctgagtgttatagagctacaaaattagtaggaaattttgttgctttaacctaatcattaaattagaattgtgtgacttaaagttacaaatggtttccgaatattttgcagtaaaaaagtagtgaggaaaataaatataaatactaaactagacctgggaaatttaaggctataaagaattctagcttacagagagaggagtctttgtttgcaacctcccactagctaaatttaaattatcacaaatttcatcctctcctttacttaacccttgactcatgcaactagtcaaatgtctttttcttgctaattttttctttccatagatcacttatagggagttctggttaaaaatgatgtctctttaaccttcactaaaatgagaataggggaattaaaatgatatttaccacaaagagaaaaaaatctgggaggaaaaacaataaaataaaaaagataaaaaatttaggaatatgcagagaatggaggagttagcatatcttggaaacctgaattccaagtacttagaacttgggaagtcctagaaatgtgaagcaccagctactgcagaaggcagagatgaatgtgaggtaagatagtgagactgtgaagagaaatcattcagtaaaaaatgcattatcaagccaactgccactggtctagtggagtttaatcccactggggaaattctaaatggattgaagacatgtgtttaagagttagttattctttcaaaggggcaagggagctggggtatttatacacaaaatcctgctagtcattggtttaggactgcttccaacgggggaattattttcctagcatttctggcataccaccttggcaagaaaaattattttgtgtccagagtatgtctaaagccattagggaaaaaaaatgtggatcctcatagttgaaagccaggccagtctgcactaaagtggtaaggatgttttcttttagagatacaggtctaagaaagaaatctgaaggtggttacctcttatgcaagaatttaatttgatggattcaaggtgtgttggttaagagaaatggggaagggttgcttctcatgactgcggcacgattctactatactaaatttttcttttattaagcagcattgccttatgcaatgataggaaacatttgttatatgtgaaatcacttttatttttattttttaatctattcctattcttttcatttttttaacttttattttaggtttgtggggtacatgtgaaggtttattacataggcaaaccggtgtcacaggggtccgttttacattttatttcaccaccgaggtattaagccaactactcagtagttatcttttctgctcctctctctcctcccggcatctcttttaaaagaaaataatttttagcaattctttagaataagtcttggccacctaaaggtttccaggactctagttcagggagtatttatctaagtcagtagttcttaacctgatataatttcatccccagagaacatttgacagtatctcaagaaattcttggttgtcacattgggggcggggatactgctgtcatcaagtgggcagaggccagggatgctgctcaacatgttgtaatgcacaagacagccccccacaacaaagaattatttggtccaatatgtcagtagtgccaagtttcagacatcctgctctaaatcaggactgtgatgtgaattctctgcgatgatgaagatattttatatccgtgatgtgcagtactgtagcatatggctactgagcaattgaaatatagctagtgtgactgtacaccaggtgtgatgttccataccgaggaaagaagtagaaataagatatagtctttgaagtcagagctcacaatctagtagcggagacagatttttaaaaattacaatattttaaaaatattgcaatagaacatggtaatgttagaagattaataacatgctaaatttgaggcatcaggactcagacagacaattaaaaattctctgaggtgaatttccacccttagctcagaatactgtaatgtttaaaagctgttttctatacacacacacacacacacacacacacacacacacacacacccctttaaatcttttatcatgtaactcattgcttcttattttacccttttgtcagagaatacatataaaatactggaatctgatgggacattctactttatttaacaatgctattgagtttctcaaaatagtttcctaagaaagtctattaaagtattgattttttcataaaggataatacaaatggcatgagtctgtttaacattttaatcaagcttaaaattagtcttgcatttgaaacaaacttgcccagagaaattgttgagaaacttaagagaaaaacatcataaaaaattgatgggccagccaggctgtgagaatattaaaatccaaatctaaattatggttaaccattgtcacatctttctttgaagcttaagtaactcgatattccctgtaggatacccagtgattcaaagtgacacatatactgtcagctcattttccttcccagcatgctggtacaatttgtatccatagaaatatatggaaaaacctattagtcttgagtgccagaacctaccaaaaggaatctttgtcatctacaaataaattaataacataagataaacaatcctattaagttatactggcccgaaaagggaaaaaagaccagtttatgaattgacaaaagaaggtaaatgagattagccatatagcaaccactcagataataatgtgttttctctgtttagtaaaaaagcatatttgagagaaaattttcccttatagaacaattcttaataatatacatagatactcctttcctgggatgtagagtttaatcctcccctaagcccctccatgaacttggtaacttacttccagataatagaatatggaaaagtaggaataacaatggagaagaaaccaggcaggcaccaagttaactaagtagtcaagtataacatcgccagtgataataatattgatatcatgtctcctgtgatatgatgtcatgaaaaggacatgttatctctctggtattcttccccaaaacctgtaacttcttctaatagggaaaatacttcagtcaaatcttaagagacttctagaatatacctgactagtcctattcaaaagtttcaaggtcatgaagaacaagaagaaactgagagactgtcacagactagaggagaccaaaaagacccaaggaccaaatgcagtaggagattctggattggatcctgaaacagaaaaatgacatgagtggaaaaactggtgaaatctgaataaagtctgtagttttgttaatagtgttgtatcagtgtttgtttaaatgtttagataaatctctcatgcgtacagaagagttatcattaggggaagctgtgtgtcaggcacttagaaaactttcagatacataggtaccttttgtaagtaaaataatgaattaatgggtcattttatgtctgtattttatataaggctacatttctaaagagacaaaattgtgagtcccataaaaatataaaatgaatatgtgtaaaacattttattagatcattaactgatgaaggaattagtaagatgttagttacagttggttcaaaggagagtctgaagaattggcatatatatatacgtatatatacgtatatatacgtatatacatatatatacgtatatacgtatatatacgtatatacatatatgtgtatatatatattttatatatatacacatatatatataaaaaacactctagaatgctgataggaattttataacagatacaatactgatcactaactgtagggcaggaatctattgcgttccatgagaaaattttactggcatctagtgaacaagaatcatttgtgtcaccatcagccctccacaaattgacttttaaacgtacagaattgcaaaatagcataaccaaagtctaaggtacagactcttagataatcagataactcctaaggttttcctaaggaattaaagggaaagagacattctcagattaaggaaaacaaagaatttcttgctagcaaatctgctcttaaagaatgacaaaaagacattctctaaacagaaaggaaattataacgaagtcttgacatttcagaaagaaaatagtagaatgggtaaaaatgagagtaaaataatagactatcctatttaccataagtttgaagtgaaaactttaacaccacctgatgtggttctcaatgtatgtagagaaaatacttaagagttatattttaaaagaagacatacctaagtggaagtaagagtccttctacacgtcacctgaagtcaattccagtagattgcaatgttaatgcgtatcgtaatgcctggaaagaccactaaaaaactatacaaagtgatacgttaagaaaatacaacaaataaattttgatggaatcttaagaaatgttcaaataacccacaagaaggtaagaaaaaagaaagagaagaatgagaaataaagaaaacaaacagaaaccaaataaggtggcagattgaagccctaatatatccataattaccttaaatgcaaatggtctaaatataccaattaaaagagatttagctgagtggattgataaaagctgagcacacaatatgccgtctaaaagaagtttatttcaaatacaacctaggtaggttaaaattaaaagaatcgaaaaagttacattatgcaacaattaatcaaaagaaagcagcagcagtaatgttaatatcagataaagtaggcttcattgcaaagaaaattactagtgacaaacagggacattacataaagattaagtgttaattcactgggaagacataataatcctaaatgtgtttgcacctaacaacagagcttccaaatacatgaagcaaaaatgaatagagctgaaaaaagaaacagacaaatccatatttctagttagggacttcaacactcctctctcttcagttgatagaactactaaatggaaaataagcaagggtaaagagaactgaacaacaccatcaaccaataggatctaattgaagcactcctcccaacagtagcagaatacacattactttaaagctctcatgaaacattcactgatataagccatattctggactccaagcaacttcagcaaatttagagaattcaacttatatgttcccagaacataatgaaaccaagctagaaatcaataagagaaagacaaaagaaaaacctcaaaacacttggaaatgaagcagcacacctttaaatcattttccccaggtcaaggaggaggttgcaaagaaaaattttttaaacacaaagaactaaataaaatgaaaataaaacatcaacatgagtgagattctgaagcaaagggcaagcatatctactgtctatttttaaagattaagcttccttaagctcagggtttctctcctgtgatgcaatccactgtgtgtacaggtgtctcctgaacttctttgggattactctgtgggaactggctcaataaaatgttggttctttgactactgctttgctgtgagtaatctagtctttttctctggcaaaaaaaaataaagtgagatgtcataaaagcagtattgagaataaaatgtatagcattagattatttagttagaagacaggaaaggtctaaaataaataaatgagcctagagacaaaaaccatcaacaaaatattaaataacatgcgtcaaagtttaaaaaaagagtgtcataccataactaactgggatttagtattgaaggctggctcaacatttgaaagttaattagtgtaatctaccatatcaacaaactaaagaagaaaaaatcatatgattatattgattgatgcagaagcatctgacaacacccagcatccattcatgataaaaactatgagaaaactgggaatagaggataacttccacatcttaataaagggtatctacagaaaactacagttaatagcataattttaataatggaaggcttaatgtttccacccatgattgctaattagggaaggatgcccaatttcactactcttttttaacatagttctggaagttccagacactacaataaagcaaggaaaaacaataaagcatgcatattgaaaagtataaaataaaattatttctatttgtggatggcatgactgtgtacgtagaaaatatcaaatattctacaaaaacaaaagcaaaaataaccaaaaatgctcatggagctgagaagagaggttaacaagatccaaaaatacaagatcaacacaccaaagctagtcacatttttatatacagatgctcctcatcttatgatgggcttacatttagataaacccatcataaagtcaaaaaatcataaggcaagccatcacaacttacggattatctatgttggaaatgaagatgtgaaaagtgaaattaaaaacacaacaccatttataattgcttatccaaaaatgaaatacgtaggtataaatctatcatacatgtacaggatcggtatgtagaaaattataaaatgctgatgaaaggcattaaaaacaacctaaataagtggattatatggcatgtttatagactggaagagtcagcatagcaaatatgtcagttcttctcaaatcaatctaaaggtttaatttagtttctatcaaaatcttatcaaggatttctgtacacatagacaagcatactctaaaatctataagaaaagtcacaggccacagaataactaaaacagtcttttaaaaaggtaaataaagtgggagtaacctctctacccaatattatggctaacaatatagtaaggctatcaatacagtatgatgttgctggagggatagactcatagaccaaatgaaacagaatagagaacccaaaaacagacccatgcaaatgtgcccaacagatttttgataaagttgcaaaagcaattcaatagagaaagctcaccttttcaacaaatggtcctgcagaaattggacatccctagagtgggaaaaaaaaagaacttcaacctaaatctcacaccttgtaaaaacttaattcaaaatagatcatggacttaaatgtaaaacataaaactatcaaaatttagggaaaaatgagaaaatcttcaggctctagggctagaattggcattgaaagcatgatccacacacagaaaaaaatcagttggactgcatcaagatttaaaacctttgcactgcaaaagacctgtgagggaggatgaaaagacaagctacagactgatagaaaatattttcaagccatatagccaaaagatggatgtctagaatatataaagaactctcaaaactgcaaggtaaaacaagaaacaaacaatgcaattaggaaatgggcaagacacatcaagaaacgtttcaccaaaaaggatatacagatagcaaataggtgcatgaaaagattatcaaaaacattagccattagagaaatgcaaattaaaattattatatattcctacacatctatcagaatggctaaaacaaagtagttacaacaccagatgctagcaaggatgtggagaaaatggatcattcacatattgctggtggaaatgtaaaatggtacagccactgtagcaaactgtttatcaattttctgtaaaactaaacatgcagctaccatacaacccagcaattgcactcttggacatttatcttacaacctgtacaaaaatattcataccaccattattcattatagccaaaaactggaaagaacccagacggtcaacaatgaatggttgtacaaactacggtacatccatacataccaggcaatactattcagcaataaaatggaatgaaatatttatacatgcaacaacttttagatcaatctccacagaattatgctgagtaaaaacagctcatctgaaaaggttacataatgaatgattctgtttatatagccgtcttgaagtgacagaattaaagaatgaagaacagattggtgattgcaaggagtccgggacaacaggggaaagagagagagagagatggatgtgactccaaaagggcaacacaggaggcatccttgtagtgttggaactgttctttaccttgattgtgtcaatgtcaatatcctggttatgatattgtactatatttttgcaaggttttaccttcagggagacggggtcaggggtatactggttttctctgtattatttctcacaactacatgtgaacatacaattatctcaaaactaaaagtgtaatttcaaaaaacaaataaaacaattcagaaattttaagacttcaacagtcatttatctcatttgttattttactgttgagaaaacaggcacaaagaaactgaagtgacttactttcatgcttcacctaagtctttttttcttttctccatcactcagttaagagcttctgtaatacagaaagtatgtcttgtattcttttaactcccatattacttcaagcaatgttgaacacatgttaacattgtaaaagttgttgtctgagtaaatgggaaagatagaggtctatgtctatatgcaaatactttgtattaacatgtttcagtctgatataactttccacacagaaagtacaaaagaagatctgttcaagttatctgatttaattaagatagtaaaaagaaagctgataatttagggggtcttatttgattgtttttaattttacttattttccactaggtgatcattttgatgattcaaaaatgaaaatttacaaaaaggtataaaataaaaattatttctcctacctctatgcactgtcgaatcaattcccctacccaccaccaatcagtattgtcagctgtttgtatatccttcaggagatatgtacgaatttcaagcgaatatgcataagtttatgttatgtatatgtgtgtgtctgttttctatatatatgcatctttacattaatggtagcatacgatacacattttcttctgaattatgcttctctctcaacaatgtttcttggacattttcctgtatcagtacataaagaatgtatttgtttcctatgactgcaatagtgaaataccacaaactggatgacttaaccaaaagaagtctgttgtcttacagttctggaggatagaagtctgagatcaaggtgtcaggagggttggttccttctgagggctcggaaggagaatctgttccattccattcccctagtttctgatggtttgttggcaatctttggtgctccttgtcctgtagatgtctgccttcattttcacatggcatgccccctgtgtacgtgtctgtctccaacttccccttttaaggacagagtcatattggactcaggcccaaccaaatgacctcattttaagttgattatctctgtaatgaccctatctccaaatagggtcacattctgaggtaccaggggttaggacttcaacatttaaatttggagaaaatttggacagaattcaacccatagcaaagaacttaaccgttagtttaatgactacatattgttccattttgtggatgtatcataatctatttaagcagtgctctgaacattttattggttttcactttcattgttttgccttaatattggtgtctgtttcatagaatagatttatagtattttaggcttatcaagattttatttaaatcttggaatttaaattccctgtaaatttcaagtgccttgaaggcaagatatattgaggaggggagacttttaaagttcatatgaaataataaataatcgcaagtatctcaggaatgcatgaaaaataataaatgtctctgcatcaataataagggagggggcttgccttatccaatattaaacttgctgtaaagctactgtaatccaaatagtatagtattagcacaaaacaagacaagtagatcactgaagcaaaattgagagtccagaagcagatcagattgtttttggaggccgggcatggtggcttacgcctgtaatcccagcactttgggagtctgaggtgggtggattacctgaggagttcaagaccagcctagccaacttggtgaaaccccgtctctactaaaaatacaaaaattagctgggcgtggtggtgggcgcctgtagtcccagctacttgggaggctgaggcaggagaatcgcttgaacccaggaggcggaggttgcagtgagccaagatcgcaccattgtactccagcctgggcaacaagagcgaaactccatctcaaaaaataaataaataaataaataaatagatacaaattgtttttggaaacattatatggcaaatgtgttattttaattcaaggaataaaggtgttttattcaataaatggtgccagcactctttgcaattcctcttagaaaacacagattgcctcctagcttatgcaatgtaagaatacatttcaaatgcattaaagttttaaatgtaaaaacaaaaattcttggaatgaggaagacgttttctaaacaagacacaaaactcaaaagctataaggaaaaaatataccttgttactgcttaaaataacagaagacaaagtcaaaagaaaaacagcaaatagagtagatgtattcgcaacatgtgacataaagagatgcatatacctaatatacaaatttctcctacaaatttgttaattaaattaatattttttaaaattcaaacaacccagtacaaaactggccgaagtataggaatatgcaattcccagaagaggatatccagatagctggaaaaataaaactatgataatatgcttcctcatagtagtaagggataggaaaataaagaaataagacaccatgtctatctaacaaatagacagaaattaagaatgataatttttaatggaagagagcactctcagatattgcagatgaaacgcaaattgctgtggtctttgaggaaagaaatgtggtatgatctacaaaaattttaaatgcacttaccttttgatcagtcactccatttctgagaatcaatactacagaaataaaagtaccagtatgaaaggctgtatgtagaggatgtgtattttggcattgtctatgatggtcaaaaagtagaaatcaagcaaatacccttcagtgtggaaattattgaatatgttatggaattatttgggcatcccagaatgaattattatttagtctagttagagctgtgtctactgtcctgaaagaatggtgatgatatctttcaaaaatcaaaacaagtttcaattaacatattccatttttaaaataaaaaagataaaattaatcttatgggattacataaccatgaaggaggaatggagagatatatactaggttatcagtatttgttaccttggattttcaaaggagaatgaaagaggaacaaataatgtatcaagtttcacaaaaagtgaaaaggtggaatataaatattactgcaaatatataaccattgaatatgtatatggacaaggacgataagataatatagaaaactgaatatgttggttttattatgaggtggttggattgaagatatttttgtctccaaatactgttgttttaatatgttgtgttttacaaagaaacatgggctgagcagacagggaagccctgataagcatagtacctgccatgtggccattcaataaatgatagttattgattattattattagagttgtagtacagtagtgcctaccttaatatatttagattgatgcccagcagcattgagttaacccgcattttaaggacaagtgttatagctattatatactaatggtaaacttgagtctgtaactagcactgttgaaggaggacaacagagtaatatgatgtgtattggcctggggatggaagggtggtgcttaaggcacagcagattttcactccagccaggtttccttaggacctctccaatgaacaggatacctcccttcctgttctttctaccctcccaccccgttttttgctttttcagtttcagcccaaaggggaaggaagtatgatgactgactccccatcagtccctgaggtgaactgggattttgggagagtgtggcagctgcaaatttggcttcctggagataggatttttgccctcaatctggagaaagttcctgaggctacagctgttcaagcttgtgaagtaggaactttgatcccttttttcaaaagttttgtataattagcatccaacttgttagacagtatgtggctcattacaagattgccacaaattcatgctgggccgtgtctaagaacagggcaaagggagcctttggaaagtgttatacagttgaccctcaaacaatgtgagggttaggggcgctgagcccaacacattgaaaaatctaagtagaacttttcactcccccaaaacgtaactactaataggctactgttgacagaagccatactgataacataaagagtgattagcgtatactttgcattgttatatgtaatatatactgtattcttgcaataaagtaagttagagaaaatacgatgttactaagaaaatcataaggaagagaaaaatatatttactattaattaagtggaagtggatcatcatataggtcttcattctcattatcttcacgttaagtaggctgaggaggtggagggagaggaggggttggtcttgctgccaatctaaatgctgggcccagccaatgggtataagttttaagtgtgcacatattggtgaacccttacagatcacggcactgtctgttcgagtgtctattttgaaatgtccctatccgtaatataagttgcaaaggagtttgtgggcccactgaattctaccaccctgatcattgtgaagcccattcagctttgtgaagagcttatcttggtactaccttagccaaggtatgataactcagacataatgtcttttctttcatggttccttttttagtgatcatagattcagttctgtaataattagagatttatgtgtcctattagtaattgcatcattctttaaagacagtgtcaaccttgctatacagtgtgattgaagccttgacataacttgggggtttgttggcattttgaaatcccaggccccacttcaaaactgttgaatcagaatctgcattgtaagaagatccccaaaagatctgcatgcacaagccttgaaagagaagagaagccatctaacattcctcacctaagatttgaagaatttcccacttatgcaagagtaggggtgtgatttctcaggcaggatatctaacagaaaacaacacttatgaagtgtttcctgtaggagctaagcaggtggccagaaaatggcaggctacaaaggagaagaatgactaggaacctgagcaaggagaaagtctcaaagacaaggaagtggctggcagtgtcagggactaccaggcagctgaaaaagctaggtgtgaacactatttcttggagttttcagcaagtaagaggttcatgatgatgcctcaaagaatttacagtggaaccagagccaagaagtcttattgtggtgagttgggaattagggaaagtgttatacagttgaccctcaaacagtgtgagggttcggggcgctgagccctaacctcaagtaagaggttcatgatgatgcaatcaaagaatttacactggaaccagagccaagaagtctttttttttttttttttttttttttgagacggagtttcgctctgtcgcccaggctggagtgcagtggcgcgatctcgactcactgcaagctccgcctcccgggttcacgccattctcctgcctcagcctcccgtgtagctgggactacaggcgcgcgccaccatgcccagctaatttttgtatttttagtagagacggggtttcaccgtgttagccaggatggtctcgatctcctgacctcgtgatccgcccgtctcggcctcccaaagtgctgggattacaggcgtgagccaccgcgcccggcagccaagaagtcttatggtggtgagttgagaagtagggaggtggaaataaggaatggagatgaagacatgaaaggaatttgagaaatgaggcaatagctagagaagaatataggaatacacagatccagcaacccagcaagggaagggctagattctgatttcatgagcaaattgcctactaattaaattcacaatatcagaggaaactgttggactcacttactgaataatagctgaaaagtatctttgctttatagagagatcactgtagatgaaagtcatcttccagtggtgagatattcttcagtgtcatctcttcatttttatttctaatttttcttaatttgaattatttcttctgataatgggaatgatgtggtaattttgtctctcctgtaaattattttaaagatttgtacgaactcctttggcaggcttgagtgtgttgtgacagcttggcttagatatgcattgaatgtcattgaattcaaactccttaccaacatagttagatagcccataggcattctacttgaccctttcaaggagatctggagatgcaattgtaggggaaaaaagaagaaaagaattcaagaagcaacaaagtgaaagataatttggcttgcagaagagaggtctttctatcacagtaataataatgccaattatatgtccatatatatatatacgcacacatatatatagtatatatatatacacatataactcagacataattctttcatagttctttcttttgtgcacagattcacttctgttataattacatacttatgtgacctatttgttagtaattgcttcagtttcttaaaagagcatcaccttgctgtgcaaagtgtgattgaagcctcaacatctcttgggagtttttttagaattttgaaatcccaggccccacttcagaactgttgaatcagaatccgccattgtaagacaatccccaagggatctgcacgcacgttgcagcttgagaagcactgcagtatcacacatatacacacatattcaacaccaaagagagagaaagaggtcataagctctcaggtggagactagttccatgtatatatgcatagagagaagaacaaactctaccttccagcaacgtaaaattctactcaatcatgtattcaccaaaaaagaaaaggctttctccatataatgtgtattattcatatattggcactcttcagagctcttcattccaccctaatgttatctttcttagataattcacatgacactttgttatcttccaataatttctgtcattgttataagcgaaattattcaggctttatctaagagagtaaatcaaacagtatgcctctctcattccaattctgcaatattttcattctagaatgtctaaaggagccttgaaagagaggagaagtcacctaaggccagctagaggggatatatagcagggaatggtggcaactccactcctcgtagcccagtggggttttttttttttccaatctgtatttgtatgtgagtatcacgtctatgccgattttatgtgtacatatgtaactcaaatctgttcattgtgctagttagaatcttatttccccctcttctactacactctaccctttctctttcccctcctttggcaaccaagacactgagttattaataagcagattggagcaaacattttgatgcactattgtttgatagatttgttggttcattcaataagcattaattgagcacttgctaagtgttaaacaatgtactaattgctagatttaaggatgaaaatgataaaacccttggcctctagagcctagagtgtagttggggagacaaatgggcaaattagtcacacgacaacatattccttgttaaaacagacagttgtgcataagtctgtatacccagactggagatgactctgtttccaatgttgccctgggaaacctcatgatcagtttaataatgatgtttggggtgagaggatactgagacagtttgcttctagcatagtaattacccatagaagtttggggtctttattcaaaagagtttacaggccacatgagccactgtcttgccttttataggatcacatctaagttccgtgtcatataatggccttggccttcttggctttctctgtgctctttgcctgccaataccctaattattgaagtactgtctcccgcagctcctcaaccatgagctgttcccgatcctcccagcagctatgtttctcctttcttcaaacctctttagctttttatttgtactttatttgtactaaattgtatttagagctttggagaacattcttcatagttgtaattagactgtaaagtcctgagaatgtatttttcatcttcgtagccccctgcagtatctagcagaatgcctttaaacaaatgggcagtaaataaatcccaacaaacttaaattaaatttctccaaattgcatatttaattttatagtggcatttactgataacatacattgaaataaaggccagagcataatcctctctgtttctgaatattatttatttaaatattaactttctaatccaattaggtctttcaatgacactttagatctaaatttatttttgcattgttttaaatgtcatcaaatgattcatctcttgtgttttttaatatttttggaacgaacgtgtgaaaatgagcaagtgtcatcagaatatgatgcttgggtttttttaattcaacatttctttgatcatatatttaaagactttttctcaattcctttctggatgtggcctcacaaatcatttcagaagtcaatccatttcaagatttttttttttttttttgcttttttcacttcacaggaagtcaagttcattctttaaaatgtagcaaatgattaagcaaattcaacgaatgatcttcatcaactccgaggtgtttttcccccttgaaaaatttaagttactattatttttttttctttttttttttttttgatacagagtctcactctgttacccaggctagagtgcagtggtgtgatctcggctcactgcaagctccacctcctgggttcacgccattctcctgcctcagcctcccgagcagctggtaccacaggcgcctgccaccatgtctggctaattttgtgcatttttagtagagatggggtttctccttgttagccaggatggtctcgatctcctgacctcgtgatccacccacctcggcctcccaaagtgctgggattacaggcgtgagccactgcgcccggccaattattattattttttttaaacttcacctatcataaatcttttaaaatttcacctatgataaacttcctctgtcatctggggaattacttaaatgcaatgatggccttcaagtatactaccaggcagcctatccaaatcatgaaacagaaaggctcatagaccaaattaaaatacttgaatcacagagtttattaaaatcacagtgagaagcaaacgggaaagatatgtgctaagttaacacgcttagaatagagtgtaagcagactgtgaagattagagtacttgaattctgcagtacacaacattatatgtcttgtctgtctctgtattgcatcagccttcccaattatggtgtgcttacaaggaccaaagttgacttcccaacaagggagtccaaaatgggtggtgcctgattcagtggcatgtggtttatcagagacacagagacaagaatgcatggccacagctgtaacttgccaaaatagcctgatgactagccatgtaattctcaggcagaagacttacggtgctggaataggtatcacctatggatgcctgaattaagaccttgtgaacattaagtgctcatgtgtatttatttgatcttgaatatttagtgcctcttgtatatttggtctcatgtgtatttagcatattatgaatatttagtacccaggtgcctcatgaatattgggtatcttttggtccttctatccctcactatctatgtttagtacacacatgctctgcttgctaactacttatcttctaattaacacattccaagagccaattatgtgtatctctttccactgagttcttcattcaatgacatcaagttagttgcttgaaatcagctattgtgagagcacttacaccacagaaattggcaaatgctacaattagcgccactgccctcccctagagccagttatttgacatttactagcattccactacttacatggcccttcatgctctcactccgtgtgaccactcaagccttatccctctttactgaactctacaatcaaataaaatatctttgtttcttgcttctggccctccatcaaatggctccctctcctaggaacaatctgtctctcctctatcacctttgtttagctagttaataatcccttttcagacagcacctcataaatagattcctgaacatcccaaaccggatctcctgcaccttcaatgtgctacttcagtacatttgtcttaccctttgccatatggtatttcaattgcccatgaatttgtattcctgtttagatcttaagctttgtgaggtctttttgtacttttttgtacttccgtatacctaccacataataaatatttaatgaaagcattaatgaataagtaagtgaatggagtgagtgaatgagtattcaattatgattcatttgtatcaaagtgataacatatacttacagggaaaaggccagagggggaaaaaataaaaaataataatatattttatgtatgaccttgtgtggggaaaggaacatagggccactgcctggcctgcttcttttatgcaaatcctaatgtaaaatatgatcaacgcctggctgggcagaaatacaaaaacccagtactagtgattctcccaaccagataccagctagtacagatcatagccagatttaactactgtgaagtggttaggttagaggtgacctataaggaaatgacgctaatgatcattagcatcatcttggaagcttaaaaaaatgccccagctgtaccccaagccaatgatatcagacttttgtggggaacccagatatcattgtttttaatctttaatgattccaatttagccaaagttgagtctcaacaaaccaagttcttcttactctcatattctcttcttctcgcatagataagaattaacagccagctcttctacatgtttcttagacacatatattgtttcagtggtaattcgttaacagtgcatatgtcagcaaagcatgactgaaaaaaatatctgctcccacacattctgatcccatcttgacactgcatagctgttggcgaaggcaatttcaacaatgaagaagtgggagaaatgactacattttatgtaaatatgtattcattgaaaatcaaaaggacatatgtaatgatattgtttaagattctaaatgaaggacaatacttaagagtcctctgtagtcaaatttctcagcagtaaaaaaacattgtcttttctttacaactattaaccatatggctgtgaaaatgttattctacaagcctttaagatttgaaatctgactttatgttaatacacagaatttaccacacaatcctgtatgatttctaagtagatttaaagagtagctattgctcaccttttcaacataatggtaatgatggtgcaatgtcaattacatgatactctcatgggcgtgattatatgattgttaacacactgaagtgcttatatagacatagatactgatttttatatgtacatatttaaaacaaacaaggacttaaaatggcctgtaaaagtctttctagtcagtctttctggttttggacagagaacaaataatcccttacagctgttaggttggtgcaaaagtaattgtggtctttgccattgcttttaatggtaaaaaaaacgcaattacttttgcaccaacctaatagttatctacttccatctttaacgggccctacccaagactgcatggtatataagtaagaaatgtaaatgaaaatctcaaatgctagatctgcccaggaggggaccactaatgagagaggaaatgttaacgtcccatatgaactaagctcagcttagcatttacccttcctgctattccgctagagcagtgcttctcaaaagttgacctgtaatggaatcttctgaatgcctttttaaaacgtagctggctgggccccatccccagagtttctgtgtcagttggtctgggatggggcctgagaatttgcatctctaacaagttctcaggggatgttgccggcccttgaatcacaacttaaaaacctctgctctgaagaaagggaaagctctctctgctggatttccccaagcctttttcagattttcaggagacttctgtgcggtagcttgcttccttctttccatactactactactaccactactactactacaaatagcaacctctagcatattttcagtactaaatacccagcactatatatacatcacaaaagtcccttgaggaaggtggtattatcatctccattctgcggataaggaaatagataagaaatttgctgaagatcgcagagccaaatgagactcaaacccatgtaacccatgtctgtttgactttaaagcccggaatcttaatttgttccagacaagctcattatgtgctctgatcttcaccactgaaatgttctgaatatgaggctgagggcagcagtgaggttggaaggagcagcccagaggagcaggcactgtgctggtagaatagtagtatggtggggcctgcactccctaataaaagaaggggacaatgactatttcctccttctccaaggtcgtgctgcctcccatttctctgtctgcctggtaagaagcagctctgggccatgtgtggtggctcacacttgtaatcccagtgctttgggaggctgaggcgggaggatctcttgagcccaggaaattaagaccaaccctagcaatctagtgggacttcatctctaataaaaataaaaaacttagctgggtgtggtggcacacacctataatcccaactactcaggaggctgaggtgggaggattgcttgagcttgggaagtcgaagctgcagtgagccgtggtctcaccactgcactccagcttgggcagcagggtgagaccctgtctccagaaaaacaaaaagcagcagctctgaaaagaggatctagcagtttctatatgcaggagagcatttgcgcaattgttcctggggttgaatctgagaaactcacagtgcacattcagatactatttacaatcttctaggaatagtataaatattgtggccagggcaccttcatattgtgaaacacaaaaagacttcagaccttagattatgtgtcgaaagttaggcaccaatgatttttttttccatttgttcttaagtggcaaatctttacattaacatttttggtacttgtctttagggaaatttcttctctgttctgaatgtatatattgtaattcctcatttacaattttgcctgcaaatgcaagtgagtacagatcatccagttatgaaaatgctctgagatttgagtctagctgtttcagctttaagagccctgacctagactttgaaactgacatggttttatatgtatgtggttggaattaaacccaaagcacatcttttaaaactctgaggaacttctgtgccacagctttcgctcagttggtgagattttactttgaaatttaagggatgagtctagtttatatgcaaagaaatgtagggagctttgcaaacccaatcaaatcctttgtgaacagtgtgtgcatctgtttattttgctgtcattttgagtccatgatcctgtatactgttttgtgggcacatattgagggtaatatcaaataccatgtagaacagatgctgcaggtatcctttccatgtcctcttagctttggggtggtagatgggcacatggaccaagcccaaagtgacagggtattaacaggagcaagactcaaccaataagggagagtagatgggtacaaatctcagctttctctcccctcactgggataattttgagatatattccaaagatcctcagagcatccccaacagcattgagccccagttccccagattagtaatctactcaataaatacctcttttttttttttttttcccgagatggagtctcactctgcaccctggctggagtgcagtggcacaatctcagctcactgcaacctccacctcccgagttcaagtgattctcctgcctcagcctcttgagtagctgggactacaggcatgcgccaccacacccaactaatttttgtatttttagtagagatggggtttcaccatttggccaggctggtctagaactcctgatctcaagtgatccgcccgccttggcctcccaaagtcctgggattacaggcatgagccaccacgcccagcccaataaagaactctggattgtttcttccttttcctctcctcctttcctgttccctacagtgtttcctaggatcacctcagtctgctgtatgggaaacccagactgagtcaccataacagacagaggcattgttactttaggactttagtggatatagttacatgggagagagagactgtgtatgtatatataacctttataatattaaaccatgctatactcaaattatttactggccaagatttccaatataaattggaaataaattggatataaatcaagaacagttaaaattggaaatagttaaaatacaaataaaatagctaaaattgggcaaaatacctgacccaatgctttaatatccgattgcataattaaacgagtaaagaggaaaggaaattattagcaactctatatttaaatgcaactgacatccaaggaagtcatgaagaaaactctttgtgttgataaactgaaggcctcttctagcagacttctgtgtttattgttctgttgctgactattttattccaaacaaatgaacttgcttgtcattataccccacccttccctagtacagggcccccattctttgaaacagtaactcattcagttccaaggagaatatgaaaagggagggtaatatataaaagaactgaaatgaaaagtggcctaagtgtggcacatttccattgtggattccatggcaatggagaattgatggcagagcatggtgagagatgtgaagcatcaattggctgtatctccagggaattcctgaagttcagttgccaccctggagggtggcaaatgctctctctcaccttccttgagttattgcttagatgactcaaaacaaaaaactgatgagctataaatgggctgtattatttgtttttacctgctgagtagttcagatatttcaaaataatctcaaacttaacctatggtgtggtttctgtgttaaacaaaataccgtaacttttagttgaaaatactgtgtaagcccacacaatctcttgttcacagataatcttgttgtcaaacattcatgatgacaaaaactcataaacgattcttttaaatatcaagaataacttatgctgtaagtcataatttcataagcatgaatttatgaatgtgttttgtgtttgcaattttcatttaggttgtcttaaaatcatgcgttttagcttaacttaggagaaatatatcttttgtgacaacataggatattcagagaaacgtgaaaactaggtgatgtgttttatgaaagaaggcataaagtatatcaagcataagaactttgaattctatttgtgttttttgtggctttagaaaagattgttctgggaatagagaattccatttgggaaacctagcacatacacagtagcagagttaaaatactgacttggagggttcatttgaagaattctatagaatttttgcatgttgggaataggtttatattcttaaacattgcactcagggtttctattcaaagcaaaaataactttgcatagaccttggccattctttcacattctaaagtaatccatttttttttttcagggtagttgttctcagtcctgattttctgataattcagatcatctttaatttacaccaaaaacttttagaagagtcagataataatttaacataaaatgtaaatgactgaaatatacattttttaaaggagcagatatggaggggtccaatgtacttaactatttgctctctttgtctccttgcattcacgggaatgtttctatgtagttttctaatttcacacaatttcaataatccataccctcctcatttttatgggccttcatgatactaaaaatgttaccagaaattattttgtgttagtctctttgtttagcacattcatacataagttttaacatttaactggcatatttttaaagtaatacatgttttttttttaaaaaaaatcagttatgtttgtgtgtgtgcatattttcttttgtggccaaatgttgcacgccctagtccttctatttaaacaatgagtttacataacaaatgttacatgataaacatgaagacatttagtttgaaaaaaaatgattttctagtttactcatttaaaaaaagctgaagtaaccgggaagaggagtggcagaacatattagtctttttcataatgccatcattaaacaaagatacttaatttccaggcctggtgcagtggcgcagcctgtaatcccagtactttgggaggctgaggagggcagatcacttgaggtcaggagttcgagaccagctttgccaatatggtgaaaccctgtctcaaaaaaaaaaaaaaaagaaaaagaaaaagctacataatttccaaaatgacttcagtgggacctgaggtgagggaataaaggctctggagtaatttcactctctattcctctcctaattttttttctgttcctttataacaacattttcactacttttgagcttgggagttgaggaatcatgaccagaagaaaaggaaagacgggaaagatgttcaagggtgaggatgcttaagaatgacctggcaagcttatgaaaatgcagttgtctggatcccaccacagagattctgatttagcaggtctgtggcaaggcctgcgattctgcattgctaaccagctcccaggtgatgacactcatgctggcaacctatgaaccattgagtggcactgttccagggggcagggcaatgagaaattgaagtcaaaagccccaagacctggtgctacgaaaatactctggttccttccctctcaactgatttacttgtcggtgtgattttgcaaaaatccctgaacttcttaaatcccagttacctcacctgaaaagtatgagtgttgctccagatctggaggctttcagaccatgcaaatcgaattcaaaccatgcaaaccattcaagtcattctagaaagttctgcaaggtgcctcagaggccaaagggagagatgggaagagggattgaatgggctctttccaaggttccctaacccacttgaatactttcatcttttatctctttcatatattccacttttgagtatggtttcatttagaaaataggattttataccaacagatttaaagaaaaactccaagtctgaaaatgactcatttatttaaaactgtatagaacaaagacatttagtgcacaattccaaaaattctctgatccttccacagcatgcccagtatgctgcaagagtgccagcaaacacatgcttactgctcacaaatgtgaaatttaaccccatgcactaggaggtccctagtgtggggtggttttagctaaccagactaagagagtacagggcaacatcgagcctttctctgcggtcatgtctgattcattaaaaatccagctttccccgaagatatattaattaccttctgtttcagaatttgtttttagagcctaattcttaattatatctccagccattgtgtgatttgaccattttggaactaaaaagttatcctatgaaattccacctccaactattgccacactgttagtttgtctatttcatacaccatgccaatcttagcgtggtgctagcatttcattataaccagctttcatttttaataagaccatgtgtatatgaaattgtagacttcagtctttgtatgaattgaaagctattaatcttcccagggttaggttatgttaaacagattgtaatgttcttctttttattatgttatttaaatccccttcatttcatactgcaccaatacatttctactatcttggaataaattaattccagttacgtgatggaaaattttagtgtaaaaatataacctgcagtataattttttctgtcagaataccaactagaactggtatgtttcattctaattggaaatttgagttatcgctttgatttttaacagtgggaaaggaaaatgaagattgatatctttcaatagccgttcattcattcttcattccttcattcattcacgtattaagaatagtctatgtgctaagaacagaaagagtgttagagatatgaagattaataagaccagatccctgcctgcaggcatttcctattctatgtcatagatagggggctattctgtttagaggtaaagcatgacccacattgcctctgacaagaagcataatgtctgtagcagctaactgctggagacaggaggctagagggctgccctggtaattggtattcaagtcttcaagaaaggaaaccagctattccaaaatcagtgggcaagaggaagttgtaaagttaagtgaaatgactaaaatatgaataactaaaggttggaatctggtagaaggagaggagagcatcggtcagcaccttagtttgggaaggtggtgtggccatagtaggctttatttagaaagaagcaattcttaggtaccagctaggtttcagttccttaaggggagaaaactggcaaaatataggcaggtttccagggtgcaaagccacgttctagcttcagctcaggcaaggccctggggtatgaatcaccaccagagtagcccagccaaaatgactaagggatctaagctggttgctaatgaaagaggttgcagctcaaggcagctctgctgacgcccactggatactgggattacattgatttaacacatggaaaccacttaatatggtatgtggcacaacacaattaagtactcataaatatttgcagataatgctgctgccattgctgtttttgtcgttagaagactcgggaaaatcatctaatacaggaatccatctgttggcggggcttgggcttctaatatttgactggttgatttttgtcgacccaatcttaacaatattatacacagccattacttcaggaaaggcagttgtaaagaatggtataaatttcctgtaacttgactgccacattctagctgagtcacctctatatacctcagtttctttgtatccgcagtgaagattaatgacctcatagggttgttattagaatgaagtgaattactacactggacttatttaggacagtaactcgcacatagtgagtgctcaaggaaatctcagaccctgcctgctagtggagggtccagctcctgatacatttgggggcaggtttaaggagttcattgatttagagctgtaagggctgatctttcaccctgcatgtcttcagcaactgtggctggtaaagtccagagcagtcaaaggctgacaaatccttgttagaaatcacaaatgcccattctcacaacttctgtggtgttttccatcctttccctagaatactttctttttaaggcaaaggaaagaataatcactgcagatagcacacagtatttttttgcaacatattttcaaaaattatgatgagaaaagtgtatcattcctgtgaagaaacagcataaggaaaatgatttgagaaagaaacatggttcttaaactgaaacaagtgtcagaaggaatcccagaaggcagaaggaaatatagtaatcatgatgaagtctagagctcacaccggttaacagaatggcagcagcgatattcatctcacgcctcttccatgctgtccctgagtgagcttctgctgaattgcctggctggtgaggattggtttcagcagcagaaggaatgggctgccagctgaaggctctggttctgatcctgggtagggtcagagaaagcaagatgtgaccatcacttttgaccttggtcttgaatttgattccatggaacaacgatattttacaaacccagttgaaggtttatccctttttctattcaacacagggagagtccttagagccccaggaagacttagccctttttcattctaagagtaaaccacatctaggtttccagagatgaaaagaccaggctctgatcttccttctggaagcccttgcctattcaacaagcatgagtattaaatgctattgccttggaatcataattcagttttcacagtttgggctatgtcagaaccattcttgtcaaccccctgttttctgagaacccgaaacctgcttgtttagaattttagaatctacttgactcttacaggggagaaaagatctcttttctcacccatcgctaggttcatggctgaggcacctataatgaaggacaaatcaacaacataaaagcatgcgaatttatttaatataagtttcacatgacacaggagccttcagaaatgacccaaagaatcagggaaaagtgtgtatttttatgctctgatttgaggaaaagtagatgtccagtatgactggacaaaggggaatggtaataaactggggtgaccacagcaaggcctgtttctgcagaacctcctgtgtccctgtgttttcagaggtaaaaattttcctttccttccagtatagtaagggcacctctggtatgatagtctcatgacctgcttcaggggagaagggggaaggggaaggtgagagtgaccatcctgcttctgctgtcttctcaaataccaagctgccatattgtggattttggagtagcgtaacttgaatccttttttttttttttttttgagacggagtctcaccctgtaacccaggctggagtgcaatggcacaatctcggctcactacaacctccacctcccaagttcaagtgattctcctgcctcagcctcccgagtaactgggattacaggcacatgccaccatgcctggcaaattttttgtatctttagtagagatggggtttcaccatgttagccggactggtcttgaactcctgacctcgtggtccgcccacttcggcctcccaaagtgctgagccaccgcacccagccgcatagcttgaatcttatcaataccttaaccaaatgactctgacagttttcctcttcttatctaaattcttgagggtcacccacacttcccaatgtcttttgaaacttgacctcttttctgctgaattgaggaagatacctgatttctttaacctcaccaaattcctacttcttactgttgttcattgctggctgaaaatttactttggcgagttcaccaagaacatacttatcggttcactgtttatatttgcactcaagataacacttgaggccctgctactcaaagaatttagtgacaactttcttcatcactctcatatcttatctgtcatcaagtctttttttcctcgtaaaaatgcttttagctctttaagtatgtttcatatctataatagctaagataggctaacagctataatatattaaacatccaccaaatggactattaaaatgacttaaacaaaatagaaatgtatttctttctcatgtaaacagtctaaggtgaattcatgttagttggtgttggatgtgtgtgtgggaagggaggggtgacacccacataattattcaagaatacaggccaggccaggtgcagtggctcacacctgtaatcccagcactttgggaggccaaggtgggcggatcacctgaggtcaggagctcgagaccatcctggccaacatgatgaaaccccatctctactaaaaatacaaaaaatagctaggagtggtggtgggcacctgtaatcccagctacttgggaggctgaagcaggagaatcacttgaagccgggaggcggaggttgcagtgagacaagatcatgccactgcactccagcctggcgacagagcaagactctatctaaaaaaaataaaataaaataaaaataaaaaataaaaaataaattaaaaaaaaaacaggccagcaagggtcttccatctgcaatagccaattgccgaggttgccctcctgaagatattcagccagcccaaaggggaatgagctagaggactgcacacggaggcgtcccatgtcctttgactcaaccttctactggctagaactctgccctgtggccacatgtaacagcagaggggctggaaaatgaagtctagctagatacctaaaaagaagcagagaaaggtttcaagagcatttagcaaccatatccaccttattcatgccctgccctctattcgcagtggccccgcagcactgctcaactagcttgctgcattggcctcttatctcttatctattgccttagatccatctaaatgctctgctactcttatgcctggaatatgttttcaagatgtgactaatcctctcacagcttgaaggataaaaggtcaaactgctctggtgaatgcatgatgcctggtcacctctgtagccccatcttccctgacactttcacagacagtattccctttactccaacctgtgggagtattttctaattcacaataatagcaggaaatacaatgtggaccagacacagttctgagcagtatattaactcatgcatttcttacgataactttataaggttgacagtagtagtatccctatttcacagagaaggaaagagatacagataagtaatttacatatgatctcacagatagtaagtggtacagcttgagtgcatatgactcaaagggtagaggttctagattcttaatcactgtattgtactacttctcccaatgttatcgtacatgccattccgtcttcctggaatacccttcgtctttcttcatctaacttccactcaaactttaaggatcaatttaagcatgccttattttaggtagccatggttgacatcagcctaatttaattgctactcatctatgtccccatagcgtcctttgcattcctctatatctctctgctatagcagtaaatgtaccaccattccgtaaaatccttaagggaatgtttagttttatgttcccaatgccagcacaatgtccagaacagtgttgtcccatagaaatgagagccacctatgtaatcttaagtattctagtagccacgttctttaaaagtagaagtgaaactaatattttattgaccctgatatatccaacatattattatttcaatatgtaatcaataaaaagtattaataaaatttgctttttccattctaagtctttgaaatctggcatgtgtctttcaattgcatcccatctcaatttggacaccgtattttcattgaaaatatttggtctcacctgcacacgtatgtttattgcggcactatttacagtagcaaagacttggaaccaacccaaatgtccatcaatgatagaccggattaagaaaatgtggcacatatatatcatggaatactatgcagccataaagaggatgagttcaagtcctttgtagggacgtggatgaagctggaaaccatcattctgagcaaactatcacaaggacagaaaaccaaacaccacatgttcttactcacaggcgggaattgagcaatgagaacacttggacacagggtggggaacatcacacaccagggcctgtcgtggggtggggggaggggggagggatagcgttaggagatatacctaatgtaaatgacgagttaatgggtgcagcacaccaacatggcacatgtatacatatgtaacaaacccgcacgttgtgcacatgtgccctagaacttaaagtataataaaaaaaaaagaaaatatttggtctctatttacatttcataaactttatagttgaaaaaagaagattcacattcctaagttgttccaaacatacacaaaagtttttcaataactgaaccaagagtcaatttttaaatttatatttaaatttaataaaatggaataaaaatttgttaaacttcagtctctccgtctcactagcctgatttcaattgctcggtagctacctacagccagtggctcctgtgttagacagagcagcacagccctagaacacagtagatcctaaatcgatgtttattgaagaaattaatcaatgacagtgtagaaaatttgcagtgattatgtcagaatcaatagttctccacccattttctcccacactctcaaaagggccaagttttatatcaccaaatgatattcctcttacttctttctgagcagaaacagttttggaaattaagatctttttcaaattttccagactcggcattttagcagcgtttctatttgtaccaacaatgcctttctacctattttccttgcttcttaataagttaactttgtgcgaaggtcattttgtaggtcagtgtaatattgtgcattaagggcttctaagttttctggtattataagaactccttggtttccttctacttttcagaatggaaaatcctcagagcaattttcatctaaaagtgctgcatttaggttgtttcacaattccccaaccctgagtcaaatataggttggtgtatgagcagcagtgtctcttggctaatcaagagcgtctccttttgctacgctcagtgttagagaaatggagaaagtcagctgggtttagagattaggtgagagactcaggcatatcctttgataagtcataaatcatttcctgtttagaaaagcacatgtttagacacccataaaatctccaaatgaagggtgttttacttttccttcaaaatctcactgggaaaaggtacttctgactttccaagtgaataaaaataatgactcctgattaccatgtatgtttaaactgatttgcaaagcaagtgaaaaagagtctagtgagtagtgataagcatcttttagacatcagaagatgtactgatttaaaggtccgtatcattttataactagtatctattgagattcaaatggttattactctgtgtgaatctgtcttttctaattgtttttacttattttagaatatcgatttgtgaatattaaattcctaagttttccagcaatccagtgtttgttttggatatccagcctggatgcagaatagctgcagaaagttatcacaaattgatctctatattctgtttccgagtggcaattgtcaaaaatttggggtcatcggctacccctcccacccctaagaagttccttgtacttcctctttcaaaacactcacatcattgttcagtgcctcacttctctactaaaatgtaaccaaccacaaagatagggactatgtctttcctgtttactggtggattctcagtatctagcaccatgaccaatgttaatagacgttgaatcaattccagttgttacctcttcacactgggacaaaagtccttgcaagtattctgctgccatttgtatagattcaagccaaatatgtctcaaaacgatattacagatgatctcttcgttgttcctctgacaatttctttcccccctgcattgcttaacttgattgacaatgacccctactacttataacatgtgccttttaggtagtgcacttggcactacattttatgtgatagttttatgatgctaaagactatttgctgtgatgatgctgtgttctcacatggcatatccagatttatttatgctggtgaccaaaggcaggtagttaaccttgaaaataggttaaaatttgaaaggcagcaaatcttagggctagaatttataatttatctttaaggaatcttgaaaccaggtgtgaaggaagggacgtaggctagaagtacagaaacctgggttctgctccagcactgatgttaagagcaagttgcattgcttttctggaccttaattttctcttctggaaaatgaatagattaactggaacaaggaaggaaaatacgtgaatggcttccgtttctgtctcgtttacccctgaaagacatggctagtcagtcagctctgtatcagagcacttctcaaggcaatgctccaggtagctaccactcactaatgagagttagcacataggtaaaacctctttgtcatctctaggctacttcatgtttaagatactctccagctttaaaattctaataactctattagactgaaatttaagaatacgagaataatcatccctcaccatgaagagagagtctgaggaaaaaataatgagaacgaataacccttctcttttactacaattcaggactgccatgaagagccgtccagattgtgaaacatacaactcatgatgtgaatggtacttctttgtttttctcggtgtacaacttgcacagctgttcatggccctctgcttccacaaattcatttctaaatagctgtacctcagttctttgacttctagtatgtctaatttaatacacatttctagatttacgatatataagaaatatctccatgaaggaaaaatgtaatagcccatgcttttcattataatagaattttatgaaacaatgtcttttaaaaacagaaacatatgtactactacttcgcaggacattagcccttgtatataaatcaataatacaaaaaattcaaattaccaaggattagaaaagactgctgtgggatatcttctggtgcaagcatacagttatttatccatttctttcatgaatatttattgatgttccaaacattaggctagacactagagacacatcaataaataaaggaaataggtttgatctctatcttctttgatctgtagtttagtgggggaggaaggaaattaaacaagtaactactacaggttgaacatccctgatccaaaaacctgaaatccaaatgttccaaattccaaaactgtttgaatgctgacatgacatcacaaatggaaaactccacttctgacctcatgtgacaagtcacagtgaaaatgcaggcacaccacatagagtttattcagcatccccaagggaagaaagatcctctcagcccccgttagctgtgatatatcttttccacccacacccagattccatcatacaagcaaacccacaaaaggtacgaaaaatggcacatgtgcgggctagacgcgacaacggcaggtaccctacaatgtccagcatggggccaaaacctacgtgcattaatcactgtgtttgctggtatattctctggtggtgtcaagatattgttgaaaatgccctaaaggcctgcatgatatccatagggtaatgcaaatattccaaaacctgaaatttgaaatactttcagtcgcaagtattttggatatgagatattcaacctatagatggtaagggtattactatgatagtgctacgggtgtacatcaaggtaattgaccctggcttggcaggatgcagaaggctttcccaaggaagccttacctcagctgagacctgaagagaagcaggagttagacaggtcaagttggggatttggaggaggtggagtcccagcagatggaatactatgcataaaggcctggaagtgagaaagtcatgtcatgttatttcaagggactagaggaagcttagcaaactggaggcaagaagatagcttcagcacactattgaaattgtccaggtgagtaatgatgatagtgtaactaagttgtgatacctaggtatgtgagctgaacctatggagaaatgttctaggctagagaatctttaattggatatttaattatcagtatatacgtaattaaaaccttgcaagggtttgaaatggttcagagtaaagttcgtagatgagaagagggcctaggagtgaacccaggaaaatggcaaagtttcaggggtaaataaagaaaaataagctttcagtggagacagggaaatttgcagttcagtagataggagacagactaggttcgtgtgatgtcacagaatccaagggaagagaggttttcaagaaaaagtaacatttagaggtgtcaaatactacaaaagcatcatgaaagataagaccaaaatatatcctattaatttagcaacaaggaaggtattgacaacctttatgcaagtgatttcagtgttgattatggagaactcagtaattacttggtggtaactaaagaaccaagattgcagtacgttcaggcatgattgagaattgagaaagtgggggagcaagtgtaaaacaattattttaagacttttggctgcgatgggaagagagaaagggccatagtagcagaagatggatgtaggggcaggaagaacacactcttaaaagggtagtgacttacacatgtttaaatggcaatgagaagaagatggtagagagggagaggttgaggatgcaggagaaattagagataatcaatagcacaggtacttgagaaggcagaaagatgaaatttagaaattagcttcagataggaaggaaagtacagcttctattacaacatcaggggagaagggaaggaggatgggcatagctactggtagttttgtaagtttggtgaaaggttaagtaggattgttgtattggatttattttttattgaagtggaagctgcagctaaatgcccagtgatgaggaaggtgttggagtctgagatttaaggtgagtggcaatttgaaatagctgctctaggatcctatttaacagagaaaatgttgagtacacaatcagtgagcagttttaagtccactctattctgtttgcagtttcaagtacctttcattgcttctaagtttatgaaaactggttcacaatcttcttgtgcttcttatttctacctcttttccttctgttttctcacctccccagtttaaacagtcccgaattttttacaattaaatatacagcaactgccatgaaatctactgataaaagatactgcaaaatcagtttgggattgggttcattagcttacttattattatcaatcctaggccactaagcaaccttgcataaaatgcataaaatgaggagattctagtggaggatagttttcaattatctcattaatttcaggccatgtgactagtccaaatagatattataggccaagaagagcctatcttgagattttaactcccaggataggttttctacctgatcaaaagaatctaataactattcaatctcttcttaaatggtttggttttctgtgcaaacagttttacccttttagctgattttctaggtgttaaattaagaaaattctctcagatacttgttcatcatgtactaggatccctgatgtgttcagagttgtccaactttcaaagggctttgcattcagagtacctaatctaaaccctgatatcattcttttataacagaaaaccccggattagactgggacagtgtctgtcatgttcatcactgcatctccctcagtatttgtagaatgaatgaagggacaatggcaaactatagtcctaccatcacacttttggtagtgaggagaactgctgtaacttggaagattggagggggaaaaggtggctaaaacaatcatacagtaaactgggctgctatcaagagaaaccatttgtcaattttggcttttgttgccattgcttttggtgttttggacatgaagtccttgcccacgcctatgtcctgaatggtaatgcctaggttttcttctagggtttttatggttttaggtctaacgtttaaatctttaatccatcttgaattgatttttgtataaggtgtaaggaagggatccagtttcagctttctacatatggctagccagttttcccagcaccatttattaaatagggaatcctttccccattgcttgtttttctcaggtttgtcaaagatcagatagttgtagatatgcggcattatttctgagggctctgttctgttccattgatctatatctctgttttggtaccagtaccatgctgttttggttactgtagccttgtagtatagtttgaagtcaggtagtgtgatgcctccagctttgttcttttggcttaggattgacttggcgatgcgggctcttttttggttccatatgaactttaaagtagttttttccaattctgtgaagaaagtcattggtagcttgatggggatggcattgaatctgtaaattaccttgggcagtatggccattttcacgatattgattcttcctacccatgagcatggaatattcttccatttgtttgtgtcctcttttatttccttgagcagtggtttgtagttctccttgaagaggtccttcacatcccttgtaagttggattcctaggtattttattctctttgaagcaattgtgaatgggagttcactcatgatttggctctctgtttgtctgttgttggtgtataagaatgcttgtgattttagtacattgattttgtatcctgagactttgctgaagttgcttatcagcttaaggagattttgggctgagacgatggggttttctagataaacaatcatgtcgtctgcaaacagggacaatttgacttcctcttttcctaattgaataccctttatttccttctcctgcctgattgccctggccagaacttccaacactatgttgaataggagtggtgagagagggcatccctgtcttgtgccagtttttaaagggaatgcttccagtttttgcccattcagtatgatattggctgtgggtttgtcatagatagctcttattattttgaaatacgtcccatcaatacctaatttattgagagtttttagcatgaagggttgttgaattttgtcaaaggctttttctgcatctattgagataatcatgtggtttttgtctttggctctgtttatatgctggattacatttattgatttgcgtatattgaaccagccttgcatcccagggatgaagcccacttgatcatggtggataagctttttgatgtgctgctggattcggtttgccagtattttattgaggagttttgcatcaatgttcatcaaggatattggtctaaaattctcttttttggttgtgtctctgcccggctttggtatcagaatgatgctggcctcataaaatgagttagggaggattccctctttttctattgattggaatagtttcagaaggaatggtaccagttcctccttgtacctctggtagaattcggctgtgaatccatctggtcctggactctttttggttggtaaaatattgattattgccacaatttcagagcctgttattggtctattcagagattcaacttcttcctggtttagtcttgggagagtgtatgtgtcgaggaatgtatccatttcttctagattttctagtttatttgcatagaggtgtttgtagtattctctgatggtagtttgtatttctgtgggatcggtggtgatatcccctttatcattttttattgtgtctatttgattcttctctctttttttctttattagtcttgctagcggtctatcaattttgttgatcctttcaaaaaaccagctcctggattcattgattttttgaagggttttttgtgtctctatttccttcagttctgctctgattttagttatttcttgccttctgctagcttttgaatgtgtttgctcttgcttttctagttcttttaattgtgatgttagggtgtcaattttggatctttcctgctttctcttgtaggcatttagtgctataaatttccctctacacactgctttgaatgcgtcccagagattctggtatgtggtgtctttgttctcgttggtttcaaagaacatctttatttctgccttcatttcgttatgtacccagtagtcattcaggagcaggttgttcagtttccatgtagttgagcggctttgagtgagattcttaatcctgagttctagtttgattgcactgtggtctgagagatagtttgttataatttctgttcttttacatttgctgaggagagctttacttccaagtatgtggtcaattttggaataggtgtggtgtggtgctgaaaaaaatgtatattctgttgatttggggtggagagttctgtagatgtctattaggtctccttggtgcagagctgagttcaattcctgggtatccttgttgactttctgtctcgttgatctgtctaatgttgacagtggggtgttaaagtctcccattattaatgtgtgggagtctaagtctctttgtaggtcactcaggacttgctttatgaatctgggtgctcctgtattgggtgcataaatatttaggatagttagctcctcttgttgaattgatccctttaccattatgtaatggccttctttgtctcttttgatctttgttggtttaaagtctgttttatcagagactaggattgcaacccctgcctttttttgttttccatttgcttggtagatcttcctccatccttttattttgagcctatgtgtgtctctgcacgtgagatgggtttcctgaatacagcacactgatgggtcttgactctttatccaacttgccagtctgtgtcttttaattgcagaatttagtccatttatatttaaagttaatattgttatgtgtgaatttgatcctgtcattatgatgttagctggtgattttgctcattagttgatgcagtttcttcctagtctcgatggtctttacattttggcatgattttgcagcggctggtaccggttgttcctttccatgtttagcgcttccttcaggagctcttttagggcaggcctggtggtgacaaaatctctcagcatttgcttgtctataaagtattttatttctccttcacttatgaagcttagtttggctggatatgaaattctgggttgaaaattcttttctttaagaatgttgaatattggcccccactctcttctggcttgtagggtttctgccgagagatccgctgttagtctgatgggctttcctttgagggtaactcgacctttctctctggctgcccttaacattttttccttcatttcaacttggtgaatctgacaattatgtgtcttggagttgctcttctcgaggagtatctttgtggcgttctctgtatttcctgaatctgaacgttggcctgccttactagattggggaagttctcctggataatatcctgcagagtgttttccaacttggttccattctccacatcactttcaggtacaccaatcagacgtagatttggtcttttcacatagtcccatatttcttggaggctttgctcatttctttttattcttttttctctaaacttcccttctcgcttcatttcattcatttcatcttccattgctgataccctttcttccagttgatcgcatcggctcctgaggcttctgcattcttcacgtagttctcgagccttggttttcagctccatcagctcctttaagcacttctctgtattcgttattctagttatacattcttctaaatttttttcaaagtttttcaaaagcaatggcaacaaaagccaaaattgacaaatgggatctaattaaactcaagagcttctgcacagcaaaagaaactaccatcagagtgaacaggcaacctacaacatgggagaaaatttccgcaacctactcatctgacaaagggctaatatccagaatctacaatgaactcaaacaaatttacaagaaaaaaacaaacaaccccatcaaaaagtgggcgaaggacatgaacagacacttctcaaaagaagacatttatgcagccaaaaaacacatgaagaaatgctcatcatcactggccatcagagaaatgcaaatcaaaaccactatgagatatcatctcacaccagttagaatggcaatcattaaaaagtcaggaaacaacaggtgctggagaggatgtggagaaataggaacactcttacactgttggtgggactgtaaactagttcaaccattgtggaagtcagtgtggcgattcctcagggatctagaactagaaataccatttgacccagccatcccattactgggtatatacccaaaggactataaatcatgctgctataaagacacatgcacacgtatgtttattgcggcactattcacaatagcaaagacttggaaccaacccaaatgtccaacaatgatagactggattaagaaaatgtggcacatatccaccatggaatactatgcagccataaaaaatgatgagttcatgtccgttgtagggacatggatgaaattggaaaccatcattctcagtaaactatcgcaagaacaaaaaaccaaacaccgcatattctcactcataggtgggaattgaacaatgagatcacatggacacaggaaggggaatatcacactctggggactgtggtggggtcgggggaggggggagggatagcattgggagatatacctaatgctagatgacacgttagtgggtgcagcgcaccagcatggcacatgtatacatatgtaactaacctgcacaatgtgcacatgtaccctaaaacttagagtataataaaaaaaaaaaaaaaattaaaaaaaaaaaaaaaaaaaaaagagaaaccagtgctctattatctaggtatataccaaggttacccactgcttgactctcattattagccttctttgatgttctctggtacttgatgtctttcataactaatcaatgtattaatgtatccaatcatttactcgataactttattgaaagcaaaagcagttgcataccagctatcaagctggaagtgggagatacagccgcagacaaggcagatatggtcccagcccttaggagctcccagagtagcaggaggtttccccttccagtgtcttctctctgcttttcttcaaaaggaaaaggctgatgtgtataatataccatatctctttgaagttctctgattatggattttaggtttaaaccagttcttcatccatgactttataaattgaaaatccaggattttgctgtgttgttgtgttcttgttttgttttgatgtccctgttttctctagatacagttagaaatgtctaggaagaaatttttggttagtatgggagccccacaaagccatttttttaaacataaaatctgtattacatatcaggtatgaaatacagggggaatgaatcatttctccgtaaaggaaaatttaaagtaaatttcaggaaagtgaattctttcccgtttgcattaccgacagatgcagaaactttaatcgtcatttgctaagagggatatggcagataatacacaatagatgtcgtagcaacattcactcgcattctttttttttttttttaaagaaatctttctttcaagaagctattctaggatctttctcatgacagtgtcctagttcttatctttgctacacacaggctcacaaagtgttttctttgaagggcattttgttattggccctcttttcatttttcttttccgtagcaaacagaaccgaaggtgtttactccccacggtgagagggcacctgggtgcacaaacagtggtgtgaaccactggcctttctctgctttccgttccctgaatgtaagaaacaggtgcagtgatcaattcactgcgtgcagtgaaccccaggcagaaagagaacgtcgtgtcacagaccttttgttacttggagagaatgagcgggaagaaaggctgcctctgctgctactgagacccttttgcccattttattgactgctataggttcatctatcctaatttgtctccggctgtcccagtttatccctgttattcttgtgttactttactttactatattttattttattttattttatttattttagagacagagtcttgctctgtcacccaggctggagtggagtggcatgatcatagctcactgcagcctcaaactcctgagctcaagcaatcctcctccttcagcctactgagtagccaggattatagctgtgcaccactatgcccacctaattttttttttttttgaaatggagtctcgctctgtcacccaagctgcagtgcagtggtgcgatctcggctcactgcaacctccacctcccgggttcaagcgattctcctgcctcagcctcctgagtagctgggattacaggtgcccaccaccatgccctgctaatttttgtatttttagtagagacagagtttcgccatgttggccaggctgttctcaaactcctttaactgtttttttatttttatttttaatttttaaaacatattgtagagataagagtcatgctacattgcccaggctgatctcaaactcctggcttcaagcaatactcctacctcggcctcccaaagcacctggattacaggcatgagccagtgtgcctgaccctgtgtgattattattagcatcctggacactctcaaaagtgttcaggtttggacaatgaactataggatcaccctaattacatgagattaagagtagagaccttgaccaccagaaatggtcaatactcaccatatattttcttcctgatgttagaacctggtacttttgggaaatgaaattgtacatgagatatatgcagaatgggcgaagggagcgaaaagatttaaaaaattaagctcgatttattgagcgcctcgagtgcgctcagtgctgttccaagtgctgacagcagagaggtaagttctgttctccagtgttcacctcacacgtgcaagccaggtttgaaaacacactgtctttccttagtatccctccacccctccatgtgactatacgtatgtatcaagtttgtgatatttcacttctgggcttcttttcatttggaaatttaatgtcagtgtatcatgttttaattaataggacatcatgttatgaaactgttgaatcgaatattttccctaggcatcaaattacttgtcagtggaaatttgacatctagatatgagggacaaaagagatgagaaaaataatagtaaagtgttcctaaaggatgctggtatactgtttaggtattttaatgcactgttacaacctaaagtgtcttgtaaagtatgttctttagaaataaaataaataaaacaagacatctctccataggtacaaatccacttgccttcctcaattcctatccttctgtgatgggaaatctctgctgtgacaaagaaccatgttaagaaaaccataaagttgtattgtttgtagatttttttaatgactaaaggaagatattgcaagtagtagaaacaaatagaggaggtggccctgaaggtcaatataacggagttcactgcagaaaagagaaactactctaggtacgttagacacatatcaaagttttggaaaggctaaagtagcaggttttagacttggcttcgaggacagatttctaaaactatatagaactgatccaataagaaactaccatctccggggtaccactgaagcaatgatttcaagaacatactttgtaaataggaactaggaaccaggaggttgaaatctagacgctaccacttttgaagctgctgttagcaactgcccttctccagccaggaagctggagaaagaactttggaactctgatgtaggaaatctcatgtttctttgactaagctcgccaacagaaatagccaaaaggggcagaaaggtgacctatgcctcacttccactttccagatctctcacaagtatacacatttggcaaaacgttgccagatttagcaaataaaaataatgcatgcaacatacttaacactaaataaaaaaagattgtgtagaaaatttaaatttaactgggtgccttgtattttatctgacaaccctaacttattatatcctaattcataatcagaacactagctgcatggaagtctggcaaatacagtttttaatttccaacctgtccaactggaaggatggtaagtagatttaggtgagccagttcacagtattaaccaaagtagattgcctaccaagaatagctaaagcctttctgcccccagacgcttatgctaccatctgaatatttttactttgcattcttatattcttggaaatcctatcaatctgtgattcagattggtttggtttaactcagcttccccttttttttggagacagggtcataccctgtcacccaggctggagtgcagtggcacaatcatggctcactgcaacttcgacatccctgggctcaggtgatcctccctcccacctcagcctcccaagtggctgggactacaggcacgtgccaccacaccccgctactttttgtattttctgtagaaacagagtttcgccacattgcctaagctggtctcagattcctgggctgaagtgatccacccaccttggcctgacaacgtgctggaattacagatgtgagccaccatgcccagcccctctttttaaaatataaaaatctcccagaatgtgaaagttgtcagtctatactttgggaataagattttcaacagatagaagagaatgaggattaaaacataaggaagtttgggagtagaaaatatgggcaccagaaggtggaaggagagagcagatgcccatttatatatctcctttgttgggtgttggacaaatccaggtcttaaaataggaagtatttcttttccgtacttcttgaatctttcatatcccaaaagatgcatatttcccaaatcatataacccaaagtcatgctatcaaaatgatataaatcatccatggtataggttaaatagctatatatgtatatgctggtctgagacatgtatatgactattgtgtccatggaaatttgagtttggggttctggaccatttatttgcaagtgatttttggttagagaactctttgtaagttggggattgcttttacttattttatgagtaaagatgtcaaaaggatgactgctaaatttgcactgtgttaattcactatttagtgagaagaaatattagactagctatgaaaagtaaaactgcctctccaaaaagtcaaagctgatgaaaaacagtcatacaagcacaatgccgctcttcggaaacatggaaacactttttccttcccaattttccctcagattttctcttccgcatttaaaacacttgggtggttcaagtttctaggctaccactgattgtaacagcaaacagtagcaactggaagcagtgggatgttgggagaagtaatagaggtagctgctacccaagttatcctggaggattttccatggcaatgaaatcaggtagtagaagcttggctaactgagtgtaagcaaacagttctactgagaatggtgttgtcttttcaatccgtttatctgtgatggtgatagtgtgaaacaggggaattttatccaaggtttaaggaaggttatttggttaaaagaggatattgttacagtgaagtcaaactttccattaactttttgctgtaacaacagattgaacgtagcatttcaccgtcaacgagtaaagtgaaatttacagattaacttatgtgcctcttttaaaatatatcagatttctaaattgcttttatttcagaggtatgggaggttcactttctctttgaaagtgtacattatttttctagtgtcttacatctgcctacaaagatgttattttacttgaaagcacagtaactatttgatgagaatttgtcagcatcagtaaattaaagaccctcaaatgatttctactaattatagtttaattccgtacatttaatgatattttaaaacacatgagttatttcataactcccaacatcacaaggataaattttattctacaaacaaaatattgtgctaaatgaaatagttcatttaggcaaagaaaggagcacagaaaattagtggaactctctgctgtaagtaacgtagacattacatggcatattgagtctccatgaatattgtcatgttatgttttaaaaaggtgatcgaacatatggcatttaaaagttccaagtcctcttttaaatgcttcagaatctattatttaatgatcatcttggatctcaaaactgatcttttgaaagattttattcgccccatgtgttaatatgatttccctgtcatatgatatgattatctatcaatacttaaaaccagcagccaagtaaaaaatcagttcatatcatttaatgaatactatgagtcaggatctgggtaggcaagctattttcgggtttgagtagttccaaagcttaaaaatcttatattgattttacagtgaagaagaaatagtcttagctactttggaggtttcaaacattgactactcaaggagtatttccttgctttctcaggcaccaggcagtttttcaggagcaagcattcatccattcagggaattgtaacctgtagtttccacttttctagcaatcacacttaaaaccatgagagtaggccataggacataaggagctcagcttctcagggcaagcacatcctttcagctttcacctgtccgtttgttagtgttcacttccgtgctcaaggagtttcttgttgcctctgagttctaagagacagaacgaagggagaagggtgcagaagtctaacgcatgttcatggacttatctctccaataaagagcttgttttatcttcttttatttatttattttttctaatgaagccattagcctcaaacaaagccatggaatcttatcagagtgaaaccggggtcattccataggctggctgagtgagagctccatggcacgatgatgtatggtcactgcacaacaacgcctttgccacaacacatgtgccttttaattacactttaaatctcatttgaagagatgttatcattatggaaattgctctgtaaatgtgcccaggatgagacccaataaaagtttgctgagaagaattgaagacagaggagatgaatcagcagctaaaacattaccatcagacagaattttcttggctgtaggcaaaacagcccatgcaataacagaaaatcttcattgactcagaggcgtattttccctagattattatggggcactcctgcctgtagcactatcacttctttgataagctgaaggaagcgttctgctctccagctcagcgggcctttttctccccaacctcagagccatcatttgaatttatagttgccaaaatgaataatacagtattgcccttgtgttcctgacttcatgcatgcatgcagagcggggttaaggttctttaaatgaaagattgccttctattcatgcaataaagaacacctctgcttcctttccagggtcatttaaaaataactataccgctgggctatggaaagcacataagaaagattcttagggtaaagtcaaaatgctcttttctctacaacaggcattgtctcatatctttgtgtagcacagctgatttgaagttttcttttaagcacattcttaattatcttttcctttgatcttgaactgtttccctgggctaccagacagagagcctagagccctacctccgctttccccgaggtgcaaactgctccgtccttccacaggcaggcccctggctgaatgcacccttttctccatggttacccacccacctctctgttatttgttacttcccaagtgaatggcaggttaaaatgggaaaaggtcaggttatctgaatgtggttagagtgaaatgaatttcctcattgcacccaagaactgtcctttgacaggtctccttccccaaatcgggtcattttgtacgtaggctcactgggagtaattctaagacaactaaataagtaaaatcacattttggtgccattttccaatgtattcttcttcttgggggttctcctttaaaatggtactggaaggatacgttgtcttcattaatccattgtatgtcccgggggtggaggtggaggtggcagtagcagaagcccgtgaagtaataggtcgtattttgtgtttataaatatttctgcaggtttttgaggagaagatccatcattcttataaaggcattcatgacctccagaagattaagggctgttatgctagaacagtgtttcattcttaaaatggggtctctggactagcagtatcggcatcacttgggaacttctaagaaatgcaaattcttgagttctaccccagacatacagaatcatgatctctcagagtggagcccagcagcctgtgttttaatgagccctctgggtgattctcaagcccactcaagtttgagaaccactgtactaagggaactactgatgcatgatgcaagttcacgctcacaggcacgtgtgaatgacacaaagaacacagacgcctgagagagcaagaaagacaacatagactgtctgactccctgctgggcccttctttaccgcccctatttcaggctaccatgcccatgagtggatgacacgtaccccccgacaaaggtcaacaccactctcccttccacaccctatcactaagtgacaggctaagcctatgttaaactgctcacatctccttggaaattcaacactttaataataggtagcattatcacccccatcttcttctctaagccagaaacccaacttgcctccctatatgttatccttgcattcagtcagtctctaagttgtattcatgatctctcaaaaatatctccctttttctcatcctgtgtctattacctcagtttagatctccatattctcttgcctctaatgttcttgcctctaatgtaccttttcactgccaccaagatgatgttaccaaaaaatcttaaacagattagacatcttcacaggataaagtccaaacccttagcttgatacacaagccccttcacaatccaggccctccttcctgtgcagctatatatatatatatatatatatagagagagagagagagagagagagagagagagagagagaaattttgatcttaccactctgtctctcttcccgccatgggtcttcccctcttccctccggagttacttagctctgatgtgtattcttatctcgtcttatcttcaacttcattcatgtttttcccactgcttcaaatttcactctcccacttctcccctggccagctgctactcatccctcaagaccctgatcaaatatcatcacttgtatgatggcatctgcaaatcttggggggcaaggctaattgttctttgttcccacagggctgtgttccagtttaacatgatcacatgttattttggttcatttatttgcttaagactttttcagaaggctatgggctctttaaaatagagaacttacatcttgtagttttaagagtatttttagtaaaagtttagagtgacccccatctttctgccagcccacaaaaggaaaacatcaaaaagtgaatgtgtaaaaggaagagaactctgacaaaaccaggcagaaaggtttttcagcaagtctttttattttctgttcaggataacattaataattatccacgttggtttctcattctcctgttggtgaatatttttctgctaaatttaaaaccgtatcacaaactcaagcagagatttacaacatttcaacagcttttctacccctgccttagaagggtggatcaaaaacatttgtccatggtaaagcactatggacatgacttagttaacaattctctgtttgggtcaccatgaggcttcttcgtttatactcagggtcagcgacaatgctgatatgcagctacaatttctcatttcttactcagggtgttatgaagcagatttccactgttctttaatcgttattaaaatgtagtccaggtgcagtggctcacgcctataatcccagcactttgggaagctgaggcaggtgggtcacataaggttaggagttcgacaccagcctggccaacatggtgaaaccctgtctctactaaaaataaaaaaactggccgggcatggtggcaggtgcctgtaatcccagctactcaggaggctgaggcaggagaatcgcttgaacccaggagggggacagaggttgcagtgagccgagatcacaccattgcactccagcctgggcgacaagagcaaaactctgtctcaaaaaaaaaaaaaagtcattctcatgtaaaaattcttgtaaaataatctgtaaagtcatcctcttatctgttctagttcttcataagacttatataacatgtcatatgggcatggaaaggcctaagccttcccaaaccttgctcttttggggatgattttccaaatgtacttgttctcagttgaaaagagcattgcggccgggcgcggtggctcaacgcctgtaatcccagcactttgggaggctgaggtgggcagatcacgaggtcaggagatcgagaccatcctggctaacatggtgacaccccgtatctacttaaaatacaaaaaattagccgggcgtggtggcgggcgcctgtagtcccagctacttgggaggctgaggcaggagaatggcgtgaacccgggaggtggagcttgcagtgagccgagatcgcgccactgcactccagcctgggcaacagagcaagactccgtctcaaaaaaaaagaagaagaaaagaacattgcatcatggcacaaggacacaaaaaataccctggacctgcttcagtgagatggtctaagggtctctagcatcttctgaactgaactgaatgctttgggaagaattaatagatacacgatgtatattagttcgtttcacactgctataaagaacttccctgagactggggtaatttatttaaagaaaaagaggtttagttgactcacagttctgtgtggctggggaggcctcaggaaacttataatcatggtggaaagcaaaggggaaggaagcaccttcacaaggcagcaggagagagagagaaagagtgaatgggaagagccccttataaaaccatcaaatctcatgagaactcactcactatcacatgggaaaacagcatgggggaagccacccccatgatccaatcacctcccaccaggttcccccggattacagttctagatgagatttgggtgaggacacaaagccaaaccatatcacaatggaaagctcatgaatgggttctaagaatgaggaaatgtaccttagcattttgcctacttttcctttatgacatttttttcccggcaaatatgccaaatattacctacctttacatcagtgtccacatgcatatcccctgtcttcctccttttcctcatacattaacaaaagagtaactttgttttctccccatcactgttcaccctattgtataagagaagaaaagcaaaataggatgaaagaactatctaggcacacacacaaaagtcacactctccagaagaaagaatttgctctacttggtagtagacagaaattaactcactgaagatcaccagagaatcagatccaattatatcagcaggactttagtttacatcatggtactagaaccttctttaacattcaaaacttatgaatacctagaaatagttttaaggttaatatctctatgctgtgggctaaagagtacccacaaatgaatacagttgtgtctgatgagtgtctgtgattattttggaaattgtcctgctatttaaaatgaaaaaaatagaaatgtcttagattttcctatcattaacctattgtaaacaattacatcagtgtagggttgttttgtggttgcgtgggagtattttgaggtttttagggggtaaagtgggggatagaatgaagttgttgtttgcatttacaaccctaataattaaaacaagccagagggaattacctacatggctgttgtgatttctagtgtatgatcaaaaataattatggcactttgccatatgttcttgctttcttcttagatatgtgttattgggaaaagatgagacttgacatcaactaattgcttttttctaatatacaaccttgaaccacagtgattctctggaggacaaaaaatagcttagtgacaaagagattccagaaataagagcttttcgagcttttaactctctatgtaatatagacaaattgcacagattaatataaccaaatatgtattggtccatgggaagagagttacctatttgaagaataggagtgtattgtgttcatttagaaccattcagaaacatcaatgatattagttctgagttgactaaggataaatttttaaaagcaatacctaattggaaaattattcagttgttgaccattcctatcagtgctctgaaactaaatatctcacagatgccttaatgagttattataattatgttgctgtgatacatgtagcccaagtcagaagtcacttgctttgtatttaatggatggggaagacactggagcttggagggaagagaataaaaataacctagtttcaggaagatctatgctctaaccctgcttctgccacataacaacaactctatgatttgtataagttactttacctctcaaactcgtggtttcctcgataggggataaagaaggcctatttcatagagttggtgtaaaggatttataagggctgtaagtattagttcctgccctgtttcatccccctaccctacccccacccctcatcatggctctgcaaaaacaaatatgtctcagagttggaaagacccatctggtctttctcagataagggtagttttcttcaaacagactgattcctgcacataaaatataatataaaaaaccaaaagtaccttcaacattgtagacttttcatatgtggttgtctctgtgacttaaatgtacaatctagggtttgcatgttaaggtctttcaagattactgttggcactgatctgaaagatgtctcatgcaggaaatgctcacccaattatgagcactgaggctgtatagcaatatcagaaataatattgcagcacagtattttctatggattttagatgcagtattaaaaaaagaaaactcagcctgtctttaagactcgttttctctttcaacaccagaattaaaaggcatgccattcttttttaaagtttatgtgcagagccaaatgaatatcaacattagttctccactgggtccacggcttctttttaaaaatatctgaagcagtgttactctacccactttttctcaggaaattgtgtcctttagaactggcacccatatagtttaggaatgcttgatagggtatattttaggtgggagtcacctgtgcctatatggagctttgatgtcaatgcccttgtcatttggtgtcaatggttttgtcattctaatttatttggccccaaggtgtgtgtgtgtgtgtgtgtgtgtgtgtgtgtgtgtgtgtgtgtgtttgaaacacagcatatgtatttttttcttactccttgagaaatagaactttaaataacatttctatctttaaaatgtacttgtgaatagttatcactttcctgaattctaccttccaaaggtaggacaagagaaggatggaattaaatcacacatgcagctatttttataacttatgagcactcaatgatggtagcatccctcttctttaccttctctctgattctgaagccactgctgttttggttcctgtatggctgggactgcctgtccactagacttcctgccttcactctgaccctgctacatttaccctgaacaccatcctcccaataatcattaccagatgctattttcacaatgttacacctttacacaagaagctacagtggaatattatccttacagaatcagataaaaatctccaggcggcattctaagctctcattggctacactgtaccctttgaacctgaacttcctgagaactacctcttagctcctgcctgtagctctggctcccatcttcatgcagtaggtattcgttttcttttgaacggcctcatatcttctctgctagcaggattggagtcatggcagaaagtgagagggggactagaaggatgcaacattaatgaaacctcacaataggttaggcattgggttaggtacttggttgatctactcacatcatctcatctaatctttgccaaaaccttaaaaggtaggtattatcggccctacttatagacatacaataggtacttaatgcacatttttgtgatgaataaatattcgggaatttttgcattgtgactggatgagaagaaactaggaaaaacaagacgtagatgagaaagatacctctcatcttacttccaacctaggagatcttaaatgaactcatcagttttaaaaggtaatcttaagaatggagtcagagggtcacacaaggagagaaagcatcacgtattaccagagttcgggattgcttaaggcggtttgacagtttcctccgggggtaatccaccctaggccaggcatttttaaagattagattttgaaatgaagctttgcacttgggaatatactgaggcaagaaagcatatcccttctccctgctgagagagcatatcccttctctctgctgttgcagtgcttaagtgtgagaattttcgaatgagatatgaaagcaaagacaacaaaccctgcaggataatagtctctgaggactttaataacagccgtttttaaagcaaagcctgtggactcctaaatccatagctgctcgtttaagatgcaacgcaatgcagtggacctgaaaacatactccttatctacctagagcaaccaggctccaagccaaacagcagtcctcaaattaactcttgtttctcttgggacgacaactctgctgcttttaaaggtgttgcgtggccacatatagaataagaagggaaaaaacagtcacaccctcttgtgagtctgtatccaactgcattttctgatctggttaggaacctccggtggttagattagaatcctgataaggccaagactgtgggtccaatttcttcctatggattcttctcgaaaaacttgttaggaaagatccacttcgggtttttttttttttttttttgcgcttgttttaattcccaatccataatagactgatacttttgtaacatgcaataaaaatgaattattttaaaaattacaaataccagacatacaaaatttaagccgatgctttttatttttagattgctgtacacgtttctaaagatttgctttcaatttctgttcttatgtcttcataatagaatatctgtttctgtgtgtgtatacgtatgagtgtatgcaagtgtgctccaaaagctctactatttagagctcatgtttaatgagtcatgttggataaccagtctaagggagttctactttcatataattgtttttgttttatttttatttaaatcattaacaccttttcaaaacaactgtatcaaataacagtcatttggtcatttgaagcatttacatacactgctttcttcttaaacagattttactgaatgtaaatctgctttccctggctaattcagcatcatcatcctgagcattaactattttgcttcgctataaaacgaggtgatgccttcaagggctactgatgcatggagagctgttagtttccacactgtgtgaccctggtcaattatgcatgcccatggctccttttacacctttctgattctctgtaaggtgtcacttcttcctactctcaatttagccacttaggataatttctttactattttgaattgtatgttcctgaccttctaagttcttagaaatcagaccactttttttcccatcaagctaatttaaattagataaaaattatcagtaaggaggaactaatggccttataattattcatatactaactgctttcagaaaagcttagagataatctgtctataataaaattcttaaggagatttggtcacttattgttattctttctacaccattgtgtttgtttccttacttctcagctatattaaaatggggaagttttcatttgctgagtcctattttagagaccaataattccatttacataggaaaggaaatatgtggatacgattattcatgatgttctagaatagtatcacaaccatctgcttaatggttaataaaatggttaataataaaaagaagggtacagcactaattcttgacatctcccttctttatttttcttctagtaaaacatccataacttttcctattcttccccagttgtattattacttatgaacaccatggatcattctactttttgaatgaaatagtacaaatttaatattcgataatcttgtctttgtacttttctttctaaacttttattctcggtggcttcctaaaggaagactttattctacttggtttaagcagttggtctgcattctacctatttctctcaactctcattgtccattccaatcaggttgtgcaattcattgtccctgctcataaaccaaattcatttcacctttactccattcccatgctattctttttacctggaatattttcttttgttccaatttcccaatcgtatacatccctcaaggctcaagccaagtcctgtaacttcatgaaatctatttctaacatctgatttccacatggattatcttgtaatagtaagccctgcatttgctattatttattaaagatctcttgtgttctagacgctattcaaagtattttacaaaaattccatgtaatattcaaaaaattcagcaggtatgtattattatttcatgtttagtgaaaccaaagtaatgaaagagttttcatcattatgtggctaataagggaaagagaagagaagggtcaaacctatgtctatttaactgcactttgccatgagttttctctggaagctgagaaaggagattcacaacaagagtagatgagactcagataagaaggaagtgtggaatttgaaaaagcccttcagaaaacaggatctcccctactcctaaaactgctatactgtgaacatattgcttgtctcataactgaacttttttggtactctcagctgaaatttgctctataattgtacagaactttaggccaaatgtttcttttatggggacacacattatttgtttcgtttgcacccattttctcaattactttgtgttttctcttgttgtattggatgcatctctatccactgctacaaatctgtttaatagtctttatattaataagaccatgaaattgctctttgtgtgctgacatagttatcctttattttctaatggcagtgctagatttgctaaaatttaggtagtagcattattaataggaaaaactaccaccaacaactaaacttgaaaggtaatatagcctagtggctaagagcacaatccctgaagtctgactgacgaggttctaaatcttgctgcatttattagctgtgtgaacctgggcatttttagttaaccttacagtagtttcattatcttatatggaaaatgaagataatagtagcccctaccctagagggttgttgagaggagaaaatgagctcatgtatatacagtgctttggacagcacctgatgtacagtaaggttcatgtatgttgttgttcttgctgctgctgctgctgctatggtttttgttatgtaacaactaccttttcccctttgttcattcgttattgcttttcctaaagactacaatcacaaaaaagaagaaaaaaattagagagcatacagtgaatgcagtaatgaaggcttgaatgatcttttctagttaagtcagaagtgaaataaaactatccaaaaatttctatgaaaattatcctttgtccagattggctacccactgagaactccacttgattctccatatcaatcttttgctcttttgtgctacctgagtctgaggtgtagtctttaaatgatgagtttattggcacaagacagggatgccctctctcaccactcctattcaacatagtgttggaagttctggccagggcaatcaggcaggagaaggaaataaagggtattcaattaggaaaagaggaagtcaaattgtccctgtttgcagacgacatgattgtatatctagaaaaccccatcgtctcagcccaaaatctccttaagctgataagcaacttcagcaaagtctcaggatacaaaatcaatgtacaaaaatcacaagcattcttatacaccaacaacagacaaacagagagccaaatcatgagtgaactcccattcacaattgcttcaaagagaataaaatacctaggaatgcaacttacaagggatgtgaaggacctcttcaaggagaactacaaaccactgctcaaggaaataaaagaggacacaaacaaatggaagaacattccatgctcatgggtaggaagaatcaatattgtgaaaatggccatactgcccaaggtgatttacagattcaatgccatccccatcaagctaccaatgcctttcttcacagaattggaaaaaactactttaaagttcatatggaaccaaaaaagagcccacatcgccaagtcaatcctgagccaaaagaacaaagctggaggcatcacactagctgacttcaaactatactacaaggctacagtaaccaaaacaacatggtactggtaccaaaacagagatatagatcagtggaacagaacagagccctcagaaataatgccgcatatctacaactatctgatctttaacaaacctgagaaaaacaagcaatggggaaaggattccctatttaataaatggtgctgggaaaactggctagccatatgtagaaagctgaaactggatcccttccttacaccttatacaaaaatcaattcaagatggattaaagacttaaacgttagacctaaaaccataaaaaccctagaagaaaacctaggcattaccattcaggacataggcatgggcaaggacttcatgtctaaaacaccaaaagcaatggcaacaaaagccagaattgacaaatgggatctaattaaactaaagagcttctgcacagcaaaagaaactaccatcagagtgaacaggcaacctacaacatgggagaaaattttcgcaacctactcatctgacaaagggctaatatccagaatctacaatgaactcaaacaaatgtacaagaaaaaaacaaacaaccccatcaaaaagtgggtgaaggacatgaacagacacttctcaaaagaagacatttatgcagccaaaagacacatgaaaaaatgctcaccatcactggccatcagagaaatgcaaatcaaaaccacaatgagataccatctcacaccagttagaatggcaatcatttaaaagtcaggaaacaacaggtgctggagaggatgtggagaaataggaacacttctacactgttggtgggactgtaaactagttcaaccattgtggaagtcagtgtggcgattcctcagggatctagaactagaaataccatttgacccagccatcccattactgggtatatacccaaaggactataaatcatgctgctataaagacacatgcacacgtatgtttattgcggcactattcacaatagcaaagacttggaaccaacccaaatgtccaacagtgatagactggattaagaaaatgtggcacatatacaccatggaatactatgcagccataaaaaaaggatgagttcacatcctttgtagggacatggatgaaattggaaatcattattctcagtaaactatcacaagaacagaacaccaaacaccgcatattctcactcataggtgggaattgaacaatgagaacacatggacacaggaaggggaacatcacactctggggactgttgtggggtggggggaggggggagggatagcattgggagatatacctaatgctagatgatgagttagtgggtgcagcgcaccagcatggcacatgtatacatatgtaactaacctgcacgttgtgcacatgtaccctaaaatttaaagtataataataataataaataaataaataaataaataaaaaatgatgagtttagacaaatatcattatggtagtattatattatgttatgttatattatattatattatattatgtataatgtatattccttgcagcctgccctgcattcccaatctatgactcatgctgccttattgatactgaaaaatctccactacagcatgccagcttttgaaagagagccttgggttctttcccaatacttaccttccttttagggcaacctatctgagtcctgtagcttgaaagatttcctaccagcctgccatcccaaaggaacatggatgaactatgtttatgctgatgtgtcaagtcatttcttggtatggttcatagtagtccacatggctcttgtagacaaagagatgaattactgatggcagaatttctgttctggcaacagggaaatttgcagaaaggagaccttttcagtgtgaacattttttgctcacaggtggtccaggatgcccaatgctaaatgagaagtgaaaagagcaatcagggccaggtgtggtggctcacgcctgtaatccaagcactttgggaggccaaggtgggcggatcacgaggtcaggagatcgagaccatcctggctaacatggtgaaaccctgtttctactaaaaatacaaaaaaaattagccaggcgtggtggcgggcgcctatagtcccagctacttgggaggctgaggcaggagaatggcgtgaacctgggaggcggagcttgcagtgagccaagatcgcgccactgtgctccagcctgggtgacagagcgagactctgtctcaaaaaaaaaaaaaaaaaaagagcagtcagaattcaatttttcattcagaacaaatcaatccacgtgggtaaacattttatcaaactcaagaatgctgtctttcagggtgcttttccctcaacagtcacttatttcctcttgcaagtagtatcttcgttcaggttcagtgactactgtgtattatatccaatgcttctggcaagtgggttggtggaggcagcccaagatcttctagaatcaagagaattggatccatttcccagttctaacacttatcagctatatggcttttaggcaagtcagttaaacatccgagtctcagtgctctcatctgcaaaacagaaaatgtgatgtacttcacagagccagggggaggaataactaaggtggtacatttgtacgtgctttgtaacctgtaaagccctttactgtacacgtgtcatttacagctctgtatcaccatcatgacctagaaaagcagtactgacagaagacttatcttcttgccaatgctaagataactttagccatttctgcatttctaaaggaaggagtctttatcccagtatctatgaagacttggcaggaattgccgtcaatatttagttggtaatataaacgaattaaacaaaaatgcacactaggttttaggaaaattaaagacagaactatcatttgtactcctcttacatttcccaaagtgctaaaactagacaataaatcagtcctcaataaatgcttgtttatcaattttatattcatttatttgttgataatacaacaaagatgtttatatgcagtataatatatatggcaaagatgaaaagtagcaaattcatgaatcaacatcctatttatgcttgagaagacaaagaaagtgttggtgacttcatggtatacataaccttaaggagctcgtgattgagcctgggtctctgctatcaatgtaggatataaatttcaaatgtactatcctttatatgtatgttaatgtagtaaacatagaaaactgatgctactagtgagaatacttttacttgaacaactaaaagtttgtctttaatcccctaagtgcatacacaaaaggaaagtactgtacaaatcaagtacaacagaagaagtaaagtaaaagacaagtgaaggaattatctggaacttagatctggttggctttttctcctgaagtacttagataaattaactcacttttctcttttgctgaagaagtgcaaattaggcaggcatgttattccacgtaggcaaaaggaaaaaagaaagaaaaacataaaatggctatatatttgaccaaacttcgttctgcaagaatcccaatactaaccttctaccatataaactactttcaaaatcaggctatatccttccagtacaaacctggtttgtactactcagagatactactcagaaatactttcagtatttcccttctttcaacttctgatgtgattctatccatattcccctgcctgtctcccagtcaaagagaatgggacacaactctctttagagtccatcagtgatgctttagctgccaaaaatagtgacaatagacattcattgtctgtctaccttacttgttcaacattcagaattctgcatcttaagaggctgtggctgaaaacttgagccagttcttcagaatttctaacatgttatttctgccactttttctcccttactttagcagagtaatttaattcaatttgagagagagagagaaaaaaaaaacttttctagttacacagatcaatccaattgtttggagcttcagaatgaatttttaaacttgttgaacagaagcatacaaatctctaagagcaagtcagataatatacaaagcctccattcattgtgtaggcagaaaggaatgctggtacccggcagctctctgaggaatgttcccttggctttgactattctgctgggaacaaggaaggaaacacatatataaaatgaatttataatgtctctggcttgtaatggcagaatgataagaaaagttggctgtttaatataaactgtcagttgcatattccaggcctcctctctttgaggttcctcccacatccacacgcctggctactgtttagtgcggagtacaaagtggccgtttattattattgactggtgaggcctgtgctccaaaattcattctgtcaacagaatgtaagcaaagttggcattttaaagcagggctctttcagtttctgggttttctcaggattgctatgcaacaggatcagtgctgtagtgcccggttcaagctgaaaatgttacacaggaagacataccatgtaaaggtcagattcttctactataataattttcttgatctgtgtgtatacaagtgaagttgaatgcataacctcttatcataactcttaccaaggtcctatgtactttccacctgtcaagcctaaaaatgtgtattaaatgggaaatcaaaactaataaatgtatgatgctgtactatatgtatgatgctataataccaaggtgaacttaatttgtgttgtcaagaagattttctctcccatgacagactcccaggaatgtgctggtgctgtgggccaagtgcaatcttgtttattagtctctccacgcttttatggtcagagttaactctacagattactacgtaaatagaaaatatgacttgatccatatagtaatgaaattattggcactggggtacactttatcatagaattttattgcctatcacttccataaaataatacattttgtccatagactagaagatataacttgtgaactttataaagttataaatacattactttccaactcataatggcaaggaataaatctattacaactaataagatgcccattttaaatctacataataacaggagaaggcaatacgccaagaaaagggatttgagatgtatcttcttgttagtttagcctgattgaaatgtcttttgaactaataattatttatattttgcaattctccaaattcacattcatcgcttgtttcttttgtttggtaattctgcacatattcttcttcctgctgtcctgtaggacctccaaggtgaaattgaagctcacacagatgtttatcacaacctggatgaaaacagccaaaaaatcctgagatccctggaaggttccgatgatgcagtcctgttacaaagacgtttggataacatgaacttcaagtggagtgaacttcggaaaaagtctctcaacattaggtaggaaaagatgtggagcaaaaaggccacaaatgaattaaaatggccaaattttcctcattgtcttagcacaagtaactggtatctcacatgtctacgtaaatcatccaatttcagaatgattcactgtattttgaataaatgaatcatttatttgcttggtatggagatgatacttgaggattcagattagattaaagtggtaatgttttataaacataggagacatgcatattaagacatcagagtgaatttaaatgaggagtgcagctattctagtttcataaatttctctcttggcatatcacagggttatacaaaaagtgataaaaaattaacggatatgtattatggaattatttttggcattagtctaaatgcataccagaggacagtctttaaaaccctttataacacattacaattatataatataaaacctgtaacacattataattaacagtttagaggagatagctcctacagttaaagagagactatagcaacttcctgtcttttgcttcctctcagattttgttaaaacacatcctctgtaaactaagcttttagttgtagtatactcacatactttatattttgcccccttctatgtgccagctttctttggagaagttagttaatggatgcatcatagcatctttgtaaaaagggcagagggaagttcttgttataccagttttgcaatagttccgtggaggaacaaaaggatagagatagtaagtaaaacgcccattgtaacttaaatgatctagcaagggcggggaatgaaagccaggcttcctgctttctaagcagttgcctttcttaattcatttctctttattaaaaatattttgtgctttcttctgtgtctagagaaaaagtgataatgaagggaggtagaagatgaccaaatggacttaataatagttatgggagtatacactaaatgacgggagtagttactacctctaggtagaaagattacagaagggagattttttttcttctttatagttcttctaacttgtccaaaattttaacatatatacttctataaggaggaaaatctgcatttttagtaattcagaagcactattgtaaatgtctgcatcaagtatgaaataatgatagcaactaatatttacatgatgtacctacataccacgcaatgccataagcactttccattcattgaccggtttaatgctctcagcaaccctaagaggtagattttattattgaattctttttacatttgaagaaagtgaggcacagagaggctaaataatttccttagggtcacttagcaagtggaagatacaagatgaaaacagggagtctgggtgggccaggcgtagtggctcacgcctgtaatcccagcactttgggaggccgaggcaggtggatcacgaggtcaagagatcgagaccatcctggccaacatggtgaaatcccgtctctaccaaaaatacaaaaattagctgggcatggtggcacgcgcctgtagtcccagctactcaggaggctgaggcaggagaatcgcttgaacccgggaggtggaggttgcagtgagccgagatcgcaccacttcactccagcctaggggacagagtgagactctgtctcaaaagaaaaaagaaaaaagtaaaagaaaaagaaatcagggagtctgacttcagagtctgaacttttaaccaccatatgataccgtagcatataaagaaagaaggaaacttctacaaagaaatgcatactaattgaaaggatgaaatagagagtagattttttctaggagtagaaaaggatttgtttttatgagaagtagattgctaggagtagaacaggtttatttttatgtataaggttttgttttgttttgtttttcacaagtttgcaccctggcttcccagacattgttccttatctccctattttgtatatgaattttgtgtcaacttggtggtggtacactgggagcaacaatggcaatagcattttcaaagatagggaggctctattagctttctacagcttaaactcttaagagaggtcagtatgtgtgatgacgtaggccactttgataaccttcgtcattaaaaaagaatgaaaatgtgagatggaaaaaatattggcaggtcaagttaagttattcttttctgcacaaaagaaaaagaaagatgctataattgttccgagtatcacttagtgccttttctctgcctcatgtgaacttgataaaataaaaggagaattgaaagtggcaaatagcatgtcagccaaaatatggactcttcattctcagcagtttcccatgtcagctaccgcagtttgattcttgctgtcattaatcaggtagaaaacagttagcttatctaaggtgctgccaattctagaatttaaatattcagatcaatggttttggcttttatataggcctatgtaataatacaggatatgttataagcactcataaaaagcaaagaagtaattctccacatcaaagcaatttagcttatttcctgacacttgattgaaattagggtattgatcaatctacagcaaatggcagggttcaattgagagaagtacagtataggcagtaattagggatgattatgaaatagaatagaataacactggaagagttagatatagaaccattagtggcactgataaacctgcattatgaatcttgtcacttcttccatgggggttattttaaaatgaaaagttgccacaattaaaaaatagtttcaatgatatactggaaaaataggcctgtgtttgcccaagttataacatattataaaaaattacagttggcccattgtttggtgagcgattctgaaactgctcttatatttcaaaaaaataaaaccattaatgtgtccatttttaaagaaacaaaattgaatttaaatccaaatgatttcgaagtttccctttgtattccattggctcataagagatatccttgtgcttccaaatacaagtccatattgtatcgttttccttccatttatttttcttctgccatacatcttttctcttcctgtgattaagattcttatttaagtcatcatgttatgccatattgatacatttgcaagaatactctaccttggacgctgtttatatcatattactcttttgttcaaagcttcaatcttgtaggtctccatatctccctcattcatttatttgttcattcaacaaatatttaatgaatgcctactatgtactaggcactcttctgggcacggaggatgcaaccatgaataaaacataccaaaaaaaatcactgctctaatgaagttatatttaatcattagaatctagtagaaccttctctctctgccaactgtgcctaataagtccttgctaactccttcccttctcttttctttttctgcctccagttcctttctcaccaagcatcattctgttactccccaacatagattctctgagccaagagaatcaataaattctattttctaaccccattcctactctccaacaatttcctcactctcccatatgagtatgtacccttgctggttctcacacttgcaacattctctttcctcttattctccaaattttgattcatattccataacaaatcttttcttttctggctgtttcctcactaggtcttcccaatactattctaatttacacttgataacatgtttcttcaagtgttcaagagttgctttatagggctatgcttactgcctccagctaacttatatgaatacaaaaatttcaaactcgaaatatgtgagtatggtagagtagaaagacatgggccagcagctgggcaacccagtttcccttctgttctattctgtcactaactgtcttagcatataatcttgatcaagtcacttaactgcttcagacttcaattttctccttcactgaaatgaagagtttgaccagaaatatggacagtctcttccagttctcttgcaatcgtacaattttattcttttagttctgcaatcacactttatgaacctggaaaattgtttaatttttctaccttggttttcttaattaaaatagaactgattgatttaaaaggcattatataaagtaattaagatgtctttgagagaaaagaaatttaattgaaattgtataatcctatctcataatttaattcaagaaaagtatatgctatcattccacatgcattattacatcacatgttggccaagaggtataaggaagaaaagtaagtagtcagtgataatttaagttccatcaaacaaaacgaaaacattaactgctttaagtgggagaaaaagagaaaattatttacttaaatgtacacacacatgcatacacacacagttactgatgacgttatccaatattaagatggtaattagtcaaagaaagtgtttttcattctaaaattccatatccacaatccttgcatttttaattttagaatattaataacttgagaagtggtcaagtcaattgttttacataagaaatatatatgaagatttcaatttagtctactactagattatttttccagatcattgtatatactattaactatgaaaatcacataatatgttatcaacataatttcagcagaatttacattatgtgagatttttatatttggcagaaaaatttgtaaatgttatataaaatgttcacatttatacaattgtgaacattaagaggcaaggacactgacattatatagtctgtagaagccataaatctattggggagtgcttgctattagaggttagaatagttagtgtctttgtataatggagaacaaaagaagggcaaaaagaggtggggtctacctttgagagaaaactgcaacttggacattgaatatctctgaccttctttctctctcttttagaatgttaattatgtttggatgttggagttcaagacctgtctagaaaaaaaaaatgttgacttctctttgggattctctctatttaaagagatagctcccattttaattctgtggttctttaattttttttgtttctgaagtacaaattcaaattattcatctgttgatgacaccctggagatttttctcagtgttctcttgtagtagtttcatggtttgaggtcttacatttaagtctttaatctactttgatttgatttttgtatatggtgagagataggggtctagattcattctgcatatggatatccagtttttccgcaccatttgttgaagagactgtcttttccccactgtatgttcttggcacctttgtcaaaaatgagttaactgtaggtgtgtggattcgtttttgggttctctagtcttttccatgggtctttgtgtctgtttttatggcagtattgtggttctttattatttctgcattcctcccttttctttctgcatgtttaagtgctattttattacatgagggtactaaagatttatagggatatatcattagttttataaaggaagtcaaagtgaaaaatgaattcaatataacacatttcactttaagaatgcatgcctttcagagtaaagttttattaaggatttcaaactaggcattaaccaaatcacagttgaaatatctgtgtctagagaaataacaatcactttatcagcccctataattcttagtgtcctgacactgaggagttccttaaagaccaagcaatatactccagcacatctaaaggctctgcgttttacctaaaccttacaaattgtggaaattatcagctttttagagattagcacttgccttgttaaacggtagtaacccctaagctcttgtcttcactaataaagattaatagacatagatagaagctaagcatgcccctttgaaccacctcttttattttccgttgagtgggtaggagtaagcagaatatatttgacaattagcaatgttaaaagacaaactttagacaaattccgttttgcagagtttatttgagcaaaaaacaattcatgaatcagacagtactcagaattagaagttcagaaagctccacccagcaaggtgggcaggcagtatttatagatagaaaaaggaagtgacatacagaaacagcttgactggttacagcttagaatttgccttacttgggcatagtgtaaataggcatttgccttatatggacatgagctgatcagtttacagcctgtgattagctgaaacttgactgctgggattggctgaggctcagctatttgttacaagaatgtactcttaagttgcatattgcttacatgccaagctgggttgcagtttgctatgtacagagtcagctttaggcccaatttaatttaatttaacagcaacaagcctttttgttcagagatcaaaaacatttggttaaaaccactaaggtttaaggattttctcatctaacaaaggtttgtaatttctatttcccatatctaaataggacagctcaagttatgtttttcagcagctgttttatacctttgcaatcttgatttctacatatgcaaaacaagaaggttgaactataatctctcaggttccttccaaccccaacagcctatgtatgatataaccagaaaaaaaagtcattacaaatacaaagaaacattttcaggaggagatattccacatgcaaacataggttaatcatttcaaaatatctggtatatacactcatgaaaataaaaatagggcaactgcttccgataaatgtattagaaatgtgacttgaaaacatttcacgggcttaacatggtcaaagaaaatgttttgagctcacaatgttccttacatttagatcttcaaaatcaagtcactgacaaatgccacctttgccctgtggagaccaagaagtaatgtttggggcatatcagaaatgctttaataaatgctttatcaaagaatggttctggagcttacctgtggaattgtgaaggttcttgttgaaagcagagattgttgatagaattatagaaagtctggaggtggcacctagcaatctcaattttaaacaagctactcaaatgtttcttatacacactatagtttgagacccagagctttaggttgaatacatttgtatatgctgttttaattcattctctggctgcctttcacctcttcagttcttactcagtgttctctgtcctttgtaagtttttcgcttcagtttttgtcctcctatcacatttttcctttcactcttgagctttaggagaggaaaaaaatgaagcaatttgatatgtagttaggatgatcaaacattctgaaattttatctaactccacagcttagaaaaaaattaaaggaagtccccttacccagatatgtgagagcttttcgtcttttgaggttccaggtccgtcttctgctgctgtattagctctcttgactgtcctctgtccctggcttctaacaacttccctatttcatgctattaagtttctcttagatcctttagaactgaattcccggctgggtgtggtagcttacgcctctactcccaacactttgggaggctgaggcaggtggatcacctgaggtcaagagttcaagaccagcctggccagcatggcgaaaccccatctctactaaaaataccaaaaattagctgggtgtggtggtgggcgcctgtaatcccagccacttgggaggctgatgcaggagaattgcttgaacccgggaggtggaggtgcagtgagccaagatcgtgccattgcactccagcctgggtgatagatcaagactctgtctcaccaaaaaaaaaaaaaaaaaagaactgaattccctaggtctcagttattttgctctctcttaggggacctaaaggggttcattgacccactaataatgagtcagcaccatttaacctagaactggaattttagcacttccttacataaacaaagccgcagcttgaggtcttaacataggcagcctgcccttcactatatcctcctctagacctctctgccacaaggatattttgtttcctctaccaggcagacagaggccaaacattagtcatcgttatattctctcttcccttcctctctccctactccccaatgtatcctagagacttaggggcagtcaataaatatttatttaatcagtgtcttttctaccatttgctgcttttccatgtctgagccctacctctctccacctacttttcaatatgtcctgcttgacagcctcttttcactctcaaagggaccaagctgtgaattccagacaccccaaggaattcgtttaaccattacacattacatgctattaaacagctaaaatcttgcatggggaattgtcgcttaggcttatcatggaaaagtggtaactgaaaggatggtacagaaacataaaagaactgacctctaattgtatgcaatctgcatgcactattatattcaattcatgacatttatggtatttcacgattcagttcttgggaaataatacccttagagtctggaacaatttaatttatcttatttgatggaaatgccttcatttttcctggacatattgtttatactgcaattatagaaagaaaatcttgacaatttggaaaagtagaaagattaagaaataaatcacctgtaaatctacctctgagggataacctggttgtcattacaaaattttttcctagtcaagcatgtgcatacaaatacatacacatacacaaatgttttagaaaaattcaaaaaatgtatttgttttgtaacctgttttctcatttagtaactgggatgatgaccttttccatatccataaatatttggctatgtcatcatattgaaccttgcaaaggattttactgtatgaatgcaccattatatatgtaataattcccttttaaattaagagctatttaattaaattcatatataaatttcattaatttctaaatttaaagcatatacaagtttcattacatttgaaaacaatcagtaggttggggttttgcatttctcaagcaattccctcatattgaatatttaagttgtttctgttttgttttatcaatcataaatgatgctatatataacatttttccacctatatctttgtatctttttccaatttctttgttagtataatttccttgaatttaagcctgtgggtcattgtctttgcacattttaaagacttttatgtattgtcaaattatccttcagaaagtttggaacaatttaatttcagtagataagtattctttggtgattctgtttgactaaggccaaaaggagaattgtatttgtaatgtcaagctaagttaccaaatggctaagggaaatgttgctccacctggttgctttgctttacatttcaatctttgcagcgttaaagtctttattatatttatgttataggtagcgttattatgaattaattagtaattgctgataatagctgagtgattgagcataatttctaatttacctgaagataaagctttgctaacactgcgtttcctctttgttttctggatgatgatttattttattaatttagcttctcatcttcaagtgaaatgtggattttatagcacagatcattcatttgtgtattcttaaatggcttctaaggattaacgtgttctaaatacagttgacggtaaagcactcagtctcctgcctaaattattcatgttcgggggaagctttcagataaatgtctgattttactcttccatgtgagttgttgtcttagtactttttacacaaaggaaacaaagcagaaaatgttgaaacttggtgaagacaaatcccaggtgcacacaaataaagaagggtagggggaaaggagacgcatttgggaagaggagcagaaaggaacagacgccagatggaagaactcaatggaaaaggctgcctagggtgtagaaatggaaaagtcaaaatgtggggagagacctttccatttctcaaggcaaaaagaattccagtactagcatgagtcacatgaaaacgaagtgtttttcattagtcactgcatccaattttttctaccagaaatattaagaattgttgactacaacagtatggaaaagcaatagattccagtgtgtatttcatgccaaaagtctcagcattctgcatgtggaaataaacatatggctaaacactgccttttctcaaaattgccatcaaactatcctctgttttgtggctctcaaaagtaagtagccagatttttattcaagactgctttgtagttcacaataggtttattgtactttttcaatggaattgttagaatcatcaattacacttctagatattctgacatggtacgctgctgttctttttcaggtcccatttggaagccagttctgaccagtggaagcgtctgcacctttctctgcaggaacttctggtgtggctacagctgaaagatgatgaattaagccggcaggcacctattggaggcgactttccagcagttcagaagcagaacgatgtacatagggtaggacatttttaagcctcgtgccttgcacatgttaagcacatagtaatccagtgactattttaaaattaattttgtttgaaattaagttgaatagaaatcttttttactcttctcacccaagggtcaattataaataatctaagccattacactgtaaatgtcaaacacatttgtgttaataataccctttaagaaatcgtccatctcttttggctatataaaaaaaagcttttcatgatgaaaaatattgaacatatacaaaagtagacagaatgctataataaaactcgtactcatcaagacatcaacaattatcaaatcacgtcagatcttatttattctatagctcttcccagattgttttaaaacaaatatcaggcgtgtgttattttattgttaatatttcaaaaggttaaaagataggattcactcttttaaggtaatcaccttgctactataatgcttttgaaatatcaataatttcatcatatcaaatatccagtccatattcaaatttccatttttctcatacatattatgcattttttaaactttttctggttttggtttaaataaaaattgaaatcagacccacaccttactttggttagttggtctttttattactttttgtttggaagtaattacagattcacagtaagtttctaaaatagaatagtttccctgtatctttcaccctgtttcttttcatcattatatgtcatgcaactgtagtacaattcttattgtcatttcaacatgcaatcaatagaaaaaatgtacatttacagcacatctcaattcaggctcattacattccaagtactcagtagccagatgttgccagtagctaccgattgaacagtgcagttctatagtttgattgtatttgggtttggctttttttggcaagactgcttcacaggtgttcgtgtattcttccatcatcaggaggtggtatataatgccttgttttctctttttgtgtgatgtttaatagctgttcacgatcagtggctaggggttgcagtgtgataattgcctatctctaccattccttcttcatttattcactggggtaggtctatgaaaaaaatgttttgcacttgtctcctattttggtactcagtatacctttcataccgaacaagcaaaatacgtttcaattttaccaatttttataataacaacttgttcactagcatcctccaacgatgaccaattatttctttgtttgtttgttttatttttatttacatttctatcttctctactaagctctgagtgaaaaaggcagagattttgtcttgttcacctccaagaccctagagtctagtaaagtgtctggtgtagagtggatactgataagtgttttggaaatgagaataaaagatacaagaacagaaatgaatagcaaaccaaacaaattactaccaaataataaaaacttgataaaatggtaccacttttgtatgttgagcatgtaaaggaaagatctctgtggagatacagccaaaggtggcatcttgaggaaaggtcaagggtttatattattctggagaagaggatataggaaattataaaaagggaagagaacatgaaagaagacccagggatctttgcaaaaaaaaaaaaaaatgccagggaaactgccagtttctcctttagccatttgccttcatatatttctgaatattaaattagcttttgtggtagggtgaaatgtaatggtgctatgtgttttaaatgttctgactttgaataaacagccaaaacactctggtgtacatatagaaaagcactcattgagaaggatgggccttttttaaaaaatgcattatgcgatatagtgaaatgagacagaatttctacaaaagatgaattttatgctagttccagaaaccaaagaaaatgaatcactggacatgtgcactaggagtcaggagactgagattctagtcatatttcttcataagatggattctgattgctattttgttcttcaactgtaatatgaggaaattggtccaaataattgctgtggtttcttccagccagtattttgttataaatactgcttcactattcctggttattagttttggttgcttgttaagagtggtaaaatgtctgtacttaacgcagtccttactcaggaatctcatgacaaagaacatgacttggggagatggtgatgctagagttatgagtgatactcaccagaatgaagttaatccgtccccacttggttagtgtgcttgctcagatagctacctgttaacctttcgtgaatttcacaggacttccagcccattgattactctgtgttttatacattagttcctctgcccttccatatttacctccttccaaatacaacttagattcaatcatctaaattttaataacttgttttcaaaagtctgaaaccctttgcttctttatctttttgttgctgcaatctacaaaactccaaaactctagctaaatattccgagactctaactaaatattttctcataccagacaacaatgtagttgtctggtacagtaccttttccggatgaccagccttcagccttccactaccaagacatcactgggtcaatttttttttttttttttttttgagactgggtcttgctctgtcaccaggctggagttgcaatggcacaatcttggctcactgcaacctccgcctcctggttcaagcaattctcccgcctcagcctcccgagtagctgggactacaggcacgcgccaccatgcccacctaatgtttgtatttttagtagagacagggtttcaccgtgttggccagatggtctcgatctcttgacctcgtgatctgcctgtcttggcctcccaaagtgctgggattacaggcgtgagccaccgcacctggccaatttaccttcaaaattgtttttgactgtctactattgttatcatcataattatagaagaccatttctcctaacctttctgcatctactcttgccaccctacaatgcaatctctacatttcagtcagaataatctgtgtaaaaaacataaatccaattatatcagtccttatcttaacactatagtagtcttctcagtgctcttggaaaaagaccaaaatcctcaacaagggtgacaaggcactatctggcttgtctggcctcagcctcctctttcctagatgctcttcccttgctgtttggatgccagccatactgcctccatttactttttccaattctgcgtgtccctcttatgtggggctttaaatatgttggtcctctgtctcaaacccttttacctatacccacccactcataatatcctggttatcatctaataatcctttacatcttggctcggacattgtgcaaacttttccctgttgtctacatttgaccagatctttctttacacacttctaaaattgtctacttttctataacatagcgttgtttgtcatcacgtacatgtgttactatttgataaatatcgactactcttgctaaaccatgtccttcaagaagatttttgggagggggaaagctgtcatttttctactcagcacattccaaagtgcctagtatacagtagacactggttagataaaggaaggctattgagaccaagagcagggaaagaaagaatagagtggtattcccttcttatttacaggagttttctgtttatttctaattaagcatctttttgtaaagtgtgtagagctactttgatgcacaggtttttttttattattatactttacattctgggatacatgtgcagaaagtgcaggtttgttacataggtatacatgtgccatggtggtttgccacacccatcaacccgtcatctacattaggtatttctcctaatgctatccctcccctagccccccaccccctgacaggccccagtgtgtgatgttcccctccctgtgtccatatgttttcattgtttatctcccacttatgagtgagaccatgcagtgtttggttttcggttcctctgttagtttgctgagaatgatggtttccagcttcatccatgtccctgcaaaggacatgatctcatccttttttatggcttcacagtattccatggtgtacatgtgccacattttcttaatccagtatatcattgatgggcatttgggttggttccacgcctttgctattgtgaatggtgcttcaataaacatacgacatacagcttttacttgtagtttggcgcaatgctttttcaagcttctcttggtatctttaagaaaaattcttgacacaaaacactctccttcctcaaacaacatcatcgctcctgagtgctgatgagagaacagtttagtagcctgtttgactcaaagttttgtcacatgtatgtggtagccctttcatatatggactgtctagttagtgatgctcttgaagcctatgggcaaaagaacaatggaaaatccttgaaactggatctgcgtatcagatctcctgaactcagttagaaaaagagaaaaagaacagaatcagtacaaaattccatcaagatctaatagttgacagatcttatatttgtggacttttgttttactttgccatgtttccagaattgtacattgtattgctctttatgggtttcttgatttaattgttgtttgtatagaatccttggtatcaagatgggtcactgtaattgtaaacttattccgcaagtatttagagtgccacttttttaaaaagtcatctgcttactctctattctaaattattaatatcctttgctgatgctttttatggggatacaaatcccattaaaatgtcaatagttgaaactaaaatcaaatgttgttcattttcactttcattttctataaatcaggatgtttacaaaacaggtaatttgtgtttttctttgtataccatttcagattagtgataatattttgtagcaaaatattacatatcttgtactcttttcttgtagagaaaatatacagtcaatatcaattgctgtcatggagagatatatggttcttctgtaggtaaaattccaagatactccacagacatatttggggaccatagtctcactcctcaaagcaattttcacacccatgggagtagatctgtgctccccaaaccagctgggcagcataacaactgcaactgaatggctctcaagactaattaataaaataatgctccagatgcggtgaagtgttataaataattaaagctcaaatatgccttagcaaatataaactgaccaatttttatgtcttttgaatacattatcctggcttttacagttcctcattacttgcctcactagactgactcgttttcaattagtgggtgttattctggtccagatatattttaaaaactgacttcctttgttttacttgagcagtcactaaagtgatatttattacttgtctacttctgtgattaacctagagagagttttaaaggagcaaatcatagtggggaatttctaaggagaactgcaataaaacatcagcttattcaactcccttcctcctaccccaaatccaaatggagattagatcttgattgtaacaacagtgtaggtaatgactttttgtttgcctttttactaatgaaattgtttgtcactaggttttcatctttcaattaaaaaaatctctataatcccttccctagagatcattaaggataccttcaaagcttcccgagattttctggttaagatttagatggaagtaatcaatacatacattattaaaagagtggacagaaagccattattgcttggatgctgttgacaaatgaaaaggcttgaataaagtagtttacttgttcatttgtcaggtcatatattatgcatgttcgatttcttcagaagtcaccacaaagtgagagacaggctgagaaattcaataaaattatcctgaaatcatgttgtagattatacatttatttaggctcattctgttatcagtgctggcctgcttacgtgggatacattttagtatgtatgttagcttgacgagttttctgtgttttctttttacagaaagagaaaatatctttggatgtcatttgtgaatgttaagatttaagtcagctctgtgttaagaaaaatgcgttgttccctatcacctctgaaaaacaaccaaaagttgcgatagagtgattcattcttttttcttttctttttatttattttttctttaatttttttttgagatggagtctcgcctgcagcccaggctggagtgcagcggtgcgatctcggctcaccgcaagctccacctcctgggttcacgccattctccttctcctgcctcagctgggactacaggcacccaccaccacacctggctaatgttttgtatttttagtagagacggggtttcaccgtgttagccaggatggtctcgatctcctgacctcgtgatccacccgcctcagcctcccaaagtgctgggattacaggcgtgagccaccgcgcccggccagagtgattcattctaacattcaatgacctggcctcttagagtttctaaaccacttgactgttagttatatctactctaaggtgtctttttagccgcgttggaggaaatagacgtctttttgatctattcttcatcatttttgtataagtttgatatcctatgcagtcatatttagggatgctgaatagaaatgacttaaaaattatttttagaactgcatttctaggcatttgagtcttctgaaaactaagtctaagtcttctgaaaactagctttatcatcaaaactgaagaactgagtcatctaggaattgctgctttgctttaatgactgtaacaagatgagatgtgaataatttacaaactgacttctctaccagtcttctctctcactttgtcaaaatattttgatgtcctgacaaatactctttaaaacagtatctgcatagtgttttgccttgacaaagcacttttacacacattattcatttaattacaaatgatccccttgatttttttctgtgctcttccttttgtcccccaaaaacattattttaggaaaaattataccataactcagattcctagaatttattggttctttcaagaactttttttatgaagagcctactctatgttaagcatatgttagggaacaaaatgagtctctgcccctatggatgtttagattttagtgacagaaatacatagtaaacccataaattaatatatgaaattatgttgggtagtaagtgctatgaagagaaaataaacaaagcatgaatagagaaagattgaggagtactggcctatgtgaggaggttattttggggtaaagacttgtgtgaggccgggtgcagtggctcatgcctgtaatcccagcactttgggtggctgaaacaggcagatccctggacgtcaagagttcgaaaccagcctggccaacatagtgaaactacgtttctaccaaaaactagctgggcgtggtgacacgtgcctgtagtcccagctacccaggaggctgaggtaccagaatcgcttgaacttgggaggcggaggttgaagtgaaccaagattgtgccactgcactctagcctgggtggcagagtgagaccctgtctcaaaaaaacaaacaaacaaaacctgtgtgagtgagtaaaccatgcaaaaaccttgaatgaagaggattctaggcagaagaagcaccaaattcaaaagcccaatggtaagaacaggttttgagtgttgtagaaatagcaagatgagctgtgtatctcaagggaaataagatcagtagacagtgataggttctagaaagagggaaaggccagataatgaatggtcttgcaggccatagtttggaggtggattttattctgtgagtaaagagacatcactggaagtaaggaaacatcactggaaggctctcagcagggatgatgtgatctgatttatgtgtttagaagttgactcttgctgctatggagaattgactataaaaagagcgaaactgaagacacagaaaaggagggtggtggagtcatctcagaaggaaatgattacttggactagagtggaaatgataggtatggtgaataattatttgatcgaagatatatttggagggtagaattgatagaacttaagatagatagaatgtggagtttgagaggaagcaaagagtcaaggaaaattctgaggtcaatggcttgaacaaataaaataatgatgttgccatctgagaaagacttgggaatgatcacgtttgagtgtatgtgcttagaatgaaccagggttccatttttggattatgttgatagacagacacaaagggtatgattcagatattatttaccacttatacttgacaatctcaaattttggctcagtatcttgagaacatacacaaattaatttgtcacagggttttctaataatccattcatttctactaacatttcagaagtaatttccaaatcttaaagtttaggcttaatgacctaagacctaattccctaaatggccacgggaactagattgagttttcaccagtgatctctcaaggtcagctcagaacttaacaacattattgtcagtaggaagtaacttccccagtgattgttggaagcagcccagccttagaattaagagtcaaacagctgttcaagatgctgtgtgcgcagtaaactattcctccatagtatcacagacctgcaagcaggctggactattctagcccgtgcccttgatctcagagaatacaatctttgttttcaaagacttccagaaaaataaatctcaacacagagtttgttaaacacattttccccttatacactcaaaaatgttttttcattgactataattagatttttaaaaaaaaaacataatttcaggcctgaaatatgttcatttacttttcaattttacatcaaatttattcaatctcatttataaattaatattgttgttcatgttgttgactatctgaaacaatgaatggatgtatctgatacttcaatcccttatcttcacttttattcagaagtggagtgaaaataaggcggagctttttgtcatcttatttagatgattatttagtcaaactcatagaagcagagagtagaaaaatggttgccatacattgtaagggcgagttgttgctcaatggatataaagtttcagttatgcaagatgaaaaagttctagaggtctgctgcataacattgtgcctatagttaacaataccgatttgtgcacttaaaaatgtgttaaccgaggtccggagatcaagaccatcctggctaacacggtgaaaccccatctctactaaaaatacaaaaaaagaaaaaattagccgggcatggtagcaggcacctgtagtcccagctactcgggaggctgaggcaggagaatggcgtgaacctgggagacggagcttgcagtgagccgagatcgcgcaccactgcactccagcctgagtgacagagcgagactccgtctcaaaaaaaaaaaaaaatgtgttaacagggtaaagttcatattaagtgttcttatctcaataagaaaagatgattatggccttttctttatagcccagatacccatgttcataacttctgtaatactagctgtctcaaatgactattaagggaaacctctctttctgttgtttgctccattgcctctttcttcaaatttttttcttccatgaacccctatgaatttgctttagattactgggggcaatattcttgccaccctgccatgtacatcctggattgcttgcccttttccaagacctcgcttttaagttaactgagcattgcttgtcccgaagtgagcatttggtaaaatattcttatgtgtttgagactcaataaatatggtggctctttaaataaagaaggtccttttggtgacagaatatattcagcaactttcttgtcagacatagaaacaatacaggagacataaaaaataaggtagaaataacacaggaacaagaatgatgacgtaggatggcaaaactagtaaatacagatcaagttacagatatgactgttaacatcttgttctatgcctgctcggtatccatttgttgaatgaacagaactgttggatcatcctacatttcagagcctgtctagtgtcctctcatctcctacctaatcctgcagactacagaaaaagccccaagcagcagttcaaaccatggaacttctgagtgtttggacatgaaaatctcctttaagaaatcactaggttgaagaaggcaatgctaatgggaccacttcttgaggaaattccacccagtaactcagcagtgacactcagctttggatctggaacatgagtagacctagaataagatctgtccatttttcccaatttacagcattaattttttcacttatgattcatgagtccaggctttcccctgcaagcctgttttgcatctaaatcaacttggccttcatataacacactctagtgttctaactgggtgttctgtatcttagtcaacaatgtttactgagcatttactatatgccaagctatggctatggtttttaagcatcgataataacgatgcttagcagagactctcaaactgccaccatagagcaggcctgtggccgattaatgatcttaacaaattgattatagtatatgagaactggatgttagaacttagataaggttttagcaaatgcccacattttacaaatgaggacacagaggagcaggaagagtttatcaccttttctggatcactgcagccaggttctggcccagcccaggcttgaagcccaaggcttctgccactcagaacagtgctcttttcaccacttcagcctgcctcccaggatgattctaggaagttctgcttacaaatatgggtagtatttctagtcattccatcagattttattctgaaaaacacaaatttaccatttcaatatgaatacaggtaaaattcagcgccaggcaagctgtacatgattgaaagacatctgtgttttgaaaagcacgggcttttactcacatccatagtaatatgatcctaaatccactgtccccaggagaaagcaagatagcttttctccctgtcatgtcattacctatgcccagagttctcctcttgttcctctcatgaagcaaatcaatatctcacctttcatcccctccatacgtggttctgagctacttctatttatggcattatttagatatttttataatataagcaggaagcaagagggacagaaaaaaataatcagtggccaggtgtggtggctcacacttgtaatcccagcactttgcgaggccgaggcaaacggatcacctgaggtcaggagtttgagaccagcttgcccaacatagtgaaaccccgtctctactaaaaatacaaaaaattagcagggtgtggtggcgcgtgcctgtagtcccatctactcaggaggctgaggcaggagaatcacttgaacccaggaggcagaggttgcagtaagccgagatcgtgccactgcactccagactgggtgacagagcgagactccgtctcaaaaataaataaataaataaataaaaataataataatcaataacttggttcttctctattactttcaggaattttttaagtttctgatttcttccatggccattaggattttccacttatgtggcttccaaattattctaagtcagggagattttatgttttgttatcactcactttcagcttcactttagaattgcaagatttagattcaaagtgtgtaattaactgatggccttaggtaaaccctaacttatctgtatctcaatttgcatggatgaaacattcataatataaaagtatacaccacaaatatacctactcaaccaaactattggctccttaatgacaaagattaagtctctatatctttcctaactttgtacctaataggttcaaaataaatattttttgaatgaacaaattagtgagtcaacaatcagtcacccggttggccagtacctatggtgttttaagtgcaatctaccagataattcaaccttcataataaatagatttatcttgagattatcattgctataatagtgtagtagcatacttcatataagtttattttgtgaaccttaagaagctcaaggacaaacatctgtgtagtattcctaacattttctaaattgcatattttattttcatagaggtgctctacgtctttagtattgcttctaattctctcatatcactattttggacccttgggtctggctgtcttggaaaggtgaaaagaaaggtatggggaagaggatgtgttttaacaaagataattttatctgttcaagggattcaggaagtaattatcttaacatctgaatgctaacatctgaatattgtaaatacgtattctgtatgtacatgggagaaaatatctatatctgataccttttctatcatcacataaaggaactgacttctctggtttaaaatattaaccaaaatttatatgacaaaatcagtatatatgagtatatattttctcaaacctctttcaaacaggcctttttgggagacaagacacttatcaaaatcaaggctcttgacattaaatattcttgtttgtctttttttaaaaaaaagtcttcatttttctttcttttaaaatgcaataaattatactacaacatgcagtttatggtgagttattagatactgaaaaattggctttccattattttaatgcagattctacattgctttttttttactacataaagccatttgttttaagctccatgctacaaagaccacagatgttcattgcctagaacagtgtctgatacatagtagttgcttgaagtttgttaagtgactaaattaaagaggatcttacatataaccatgtttaaaattacatattgttatttatagtttttcccacatgataagaattattgccattttctttaacctctgacctccttgaaccaactatttctctctttttgtgggagttttatccttttgtatttaatctgaatcttttgaaattctaaagatacaatcacttaaccctctcttccatccactttcttttcttaatttcaggcaacaatgtgaaaataatggtgcttatgtctttgtaataacagaactttctttgtcttttctttggcctcattttaatcttcaatgactcatatttaagaaatgaactgtgcagctgtggtggatctaagtccttggcaacaactcgatgggcaaacacgtggtctctcacaatggatgctccttagctttgaattatttactgtccagttttaacaatggaattatatcatcaaatagtgccttggactttttaagtttttagtgccttaagtttttaagtttgatgagacctttaagatccatttccggccgggcgtggtggctcacgcctgtaatcccagcactttgggaggccaaggcgggcagatcacgaggttgggagatggagaccatcctggctaacacggtgaaaccccgtctctactaaaaatacaaaaaattagctgggcgtggtggcgggcgcctgtagtcccagctactcgggaggctgaggcaggagaatggcatgaacctgggaggtggagcttgcagtgagccgagattgcgccactgcactccagcctgggcgacagagcgagactccatctcaaaaaaaaaaaaaaaaaaaaaaaagatccatttccttattttacagaccttgttccaacaattatctccaccttctgtcaaggtcgtaacatatatctagggtgaccaactttcctcgttttcctgagactgtccaattttcctgaaactattctggttttaacatcgaaagtctctcatcctgaaaaactcaatgctggacaaaccaagatggttggttaccctactgctagcttccgtctttcactctaggttcaaatcattcctatgctaaaaagaacttcttatccctttgtcttgttatcctctctgtcctcctgtcgtgtcttcctcttttccttctcagaaaaagaaaattgaacatttgattttcacttgaaatacctactccttcttccactcactcctcagctatgcctacttctgaggcttctgccctccactgaaattgctctcagcacatctagtgaacactctgcaatgctgatcttactttacttctgtgtttcattggactcacttggtcaccctcttcctctcaaaattctcactctctccttgaaatttctacactcctcatttcccctaatctctccacctatttgttccttttctatctctcaagagatcctgttcctctgtttgcccattaaactttgatatgtaggcactcaacgtatattagctgaatgagaaaataactcctaagtattttttttctcctcaaacctcagaatttattatttccttgtggaaggaatgttagctttccaagctgagcatatcacagtcccttactctgtcccccatgcacagaacaccccccccacacacacacacacacaccatcatgttgcatttttaatattactcttcaataattttatcctgaatgagcatgaggggttctgaatcagaggcagatttcatttaattaccttacagtaaatattgttgctgtgcccttcctttgcccaaagacttacccctagggcaacatgatgaacgctgatgaaacattttcctacttgagtggctgggtactccataagtgggagactaggaaaaatcattttttctgcttataaaggagaaggaggctgctatccatctctcattctgaaaggttctctgtggaaacataacaggcctgagtcctaattccagcttctgcagaaaccagctagccctgtgtgtctcatgttttacaatctggaaatgtctccaaggtatgggcttcatattttttgaaatgtaaatacctagaaagatacccactccagtctttctaacaacatagagttcagcttaggaacctaccctgagctataaccgtttgaccctcttggatcagagaaatgaactagacaaattgctacagatctaatctccatggtgtgggaagtttctcaggaggctagagctttctgtaggtgaactgagacatccaggaaagtttatttcctcatacttagttgaattgcacccagcgtttgctcatctactcaacctagacactaagtgtcattcttgtttctttttctctcttctctccagcatctattcagtcaccaaattttcacacttcagatttttagacatttccctatcctatccctgtcatttttcctggtaccattgccctgagtcaaatcctcataatcttgcactgaattcttacaattgcctcattatctctctgattccatttctgttcttctcaaatacatactctgtatttatatcaggaagatctatttgaagcacacatattcctgtgccactcccttggttaaaaccgttcaaaggttcctgattaccttcaaggcaacacctaagcctcttagtggaccatatgtgatcatagagaggcagagcttcaaattctggtttaaaaatctaatgtatttccagatagcaatagtgtctttttcatctttggacatgccctctccttgttctttatgctctagaaacactggcctgcttgagattccgatacataccatactgcactatgtcctatgactctgcacttgcattttcctcttcttggaatgttctctagcatactcttccttgaataagtcatgttcatgcttttgaattctatgtgattactagcttctcctggaagcttttcccgattttcttccccatattgcgcaagtctatagcactgtctacattgtattgaaattatttacgtgtctgactcttctattatatgttaaatattcctaaatagaaagggctgttttgcattcaactttgtatttccagtttcaggtacaaccactgacacatggtagttcaatagagggagccattattatttttataattagtaatgtcagtattaattgcctcccttcaggtccaaacagagaaactaggcaaaatgataatttacttgaatttgggaaacttaattgtatgaaaaaaaacacaagaatacaacaactgaacacacacacacacacacacacacacacacacacacacacacaaacatggagatttcaagtgaaatatcaggagaatcagctttatatgtaagcagagtaaataactcacgtatctagcatgattttagggtacagaaatatcccattattcagaaagtacttccctatctgtaggctgaatcctaatattctacttacagaactccagtattttggttcaaacgccttccctttctctattgaattgtaaatagctgtggatgatgaatcattttgcaaagtatcagactcaggattcttttgaatggtgaacaccgctaagattttattaataaatgtgtcatacaatacagctctggaacacttctgtaacataatggcatatctgaaattcaaggaagaatactgctaatttgtttttccccagtgaaagaacagggcttaaattcagcaggcaacattgctaaaagacagagttgaaaaaagttacaaaaattaagccctagatcagggcaaatattactgttattgttaaacagttatattagcatttatgtagcatgcacttaatacttttattaataccctcacttctgagatcaaagaatctgggtcaataactctcttcaatggtgtcagagtatccgttaggttattctaggctcacggtatacctcacgatccttttagcactcgattatgtgtgaacttactgttttcactctgcttctagtgttaattttctcccttctttggatctagaaactttttgaaggcagaaactattcattttgtttttctcttgatcccctggataaaggaagattacagattaaagattaattctagatctgttcatttatagaaactagtgtccgcaattcctacatccataatagctcaaaacatttctactattctcaaagaggtcacaatggatgatgtaatgactatttttcaaaagtattgagacttttctcttagcttacctattttataccttgtcagacattttgacagaattaactggtgattgtcagttggattcattgtatactttaatatagcctaaggtcctgcaaatggcccttaaggcttcccattatgttctggatatccactatttggggtatgtttaagtcctcattagccatgctagagttttgcaatatataccttgaaactttagctgtagatttgaagtatggctgtcaggttacataaacaaagcactcttatctcaatgagagggcattaactatccagaatgctccccccatctccccagaatagctttacaaacacagcgctttcctcattaacagatagacccatatagcctttaaaaaaaatcattttataaccatcagtgtataaataaaagagatagaaattgacctgggagtttcataaacaagttctgagcacccaggattaattttgagaagaatgccacaagccaaataagcacttcttttcatctcatttcacaggccttcaagagggaattgaaaactaaagaacctgtaatcatgagtactcttgagactgtacgaatatttctgacagagcagcctttggaaggactagagaaactctaccaggagcccagaggtaattgaatgtggaactataataacatattgatagaaggatcagtggtgacggagcagcccatccattcttgctgccagggtctggatagctctcatattttcttggttaaatagaatcaattcaaattaaacatagatgctgaaaaaaaaataaggactcataaactaccatgcataaatcagtttgtgcattcataaataaacatcaaaagagattagcaatcagttattggaacatttagaaaataataaacaaagggagttatctgtgaggaggaattctattgttgcaaagactacaagttaattttccatttaagagcctgcctgaagtaaattagagcttgtggtatgcatcctaacgtttttctcctcaatagcttaagtgaatcttaaattgtcggattgatataaggtagaaactcaggaagatatactttagatgttctgggctgtatcaaaatttatgccaaagtataaaaaagccgttaatcagtaggttaccctcttgttcaactgtactctttctttcttccagtatgacctttttgacaatgtttaaaaaaaaagaatgtggcctaaaaccttgtcatattgccaatttagagctgcctcctgaggagagagcccagaatgtcactcggcttctacgaaagcaggctgaggaggtcaatactgagtgggaaaaattgaacctgcactccgctgactggcagagaaaaatagatgagacccttgaaagactccgggaacttcaagaggccacggatgagctggacctcaagctgcgccaagctgaggtgatcaagggatcctggcagcccgtgggcgatctcctcattgactctctccaagatcacctcgagaaagtcaaggtaccgtctacttctttgcttcagggccctttgagagactcaaaagagcttctaatctgaacttgagtgcagtgttatcttcccacaaagttaaagctagagaaatcagtccgtctttcacaaattcagtcttcattcacatggtattttctccaagagaagacagtgatctaattatttgtctgtcttcagttatatgaaatgaaatattaaaacagttacagggcaagaaatcactttgactttgatattaagtgattgtactaaagtctgatgtgtgtgtgtgtgtgtgtgtgtgtgtgtgtgtgtattggtgtattgcttgtgttacttagtatcagaatacagaaaaataaaacacttaatcaaaagccaggagtctaggtgttggcccttttgctaaccaaattacatgacttgggtaagttatggtttggtgaaataaggctgttaatgtgttgcccttcccttggaaggcaacatttgtaatacagtttcaagtttcattggcccactgcagaaatgagggaaaatcattatatatttggaagaccactgtctataagaccaaagttaaattcccttgtggcacaaagatggcaaatatattctgtagaaaaaaatacatatttaggagtatcattttgaaatcagcaactactcatctattgtcaaaatcacaaaaatcctcctagattaaaattcaaaagaagttaaattccctcatgcactcagcatgtttgccagcatctcagcatcctcattctagaagttgtcctcttccttggctttcatggaactgttccatccatgttcttcttcctatatttttctagattcttctcctagccacccctcaaatactgttgtgcccaagtttctaaccttagcctaattctcttttgattgtttaaaccctccctgtttgagatggcctggatggtgatgtatctacatctctagtccgcatctctcttctgatctctgaatccatgtggcattacgatcacaaatgcaactattctgaaaccaagttcatttgttctcctgttttccatttccctacttctgtcccctcttatctgaccttttttttcctgtttcctatttcagttaatgaatcatcatccaacaaattttccaggctagaaactttaggttcatccttaaacccttctgcattttcactgatggcacatgatggctcatgttacctcagaatagctcttttgtgttttctctcctcttttaaccaatgtcctttttaatccccagcatcttttacttagatgataacagtatacatctttaaatcccattcacccctctgtgtgcctggcatatctcagatactgcattttaaacatttggtgaattaatggatggatgaatggtttctttgctgatgttcctgcattacccagcttcttccaattccaatccaaactccttgcgggagaatacttgcctagagaatgaaatccaatgaataaggagattacgtggcccttttcttcctagccttgacttaccttctcagccatagctcctattctccagaccatttaatacactctgcccatatgatatatatatatatgtgatggcatatttgggaaaaaggggtgatatgggcagagtgtattgaatgtgtgtgtctgtaaagtatgtgtgtgtgtgtgtgtatatatatatatatatatatatacacacacacacatacatagttagatatatacatagtatatatacatatatacatagatatacacatatatatacacatagatatagatatagatatatctgcctttgcaaatgctgttctctctgtctggatccccctacgttgtctacttggcgaattctccttcagccctcaaggaccagccaaaatgttacctatctttgttgtctttcctgagtgtctacaacccccaactcccaccaagcagaagaaactgcttacagttggtactctcatagatcaccaagcatgctaaattgtcacacttaaatttcacatatattgtagcaacttgcttatgcatttttttttctcccagagaaagtgaagttgctaagagcaaggatcatgctgtacatctttgggctgctagcccagggccagcaacatatgaggaatctcattaggtaccttcatttattcactcaacaactgtttatgagtcattatataatgtgctggacaggtagttataaaagaaacagacttgatcattgccttcatgaagcctatggtctaatgttgaattgcatagctcttcattaaaatagtaggtaaaatttttaaaaagaaaagattaaaaatttgactctaatacttgtaaaatcccttctaccccaatgttttatgaccccatgtctaacatttaaagtaagggttaaccttgctgtgtactggaaaactaagggttttgaaatgtattacctagtattttaaaagcattaaatatgttgattttattcaaaaatatagggactaattttttgacagacttctccaaaaatgagaaataagttaggaaaatgtcccagtggaactaaattagttaatatgtcaattaaattgctcaatagataggctgtagagcagacataagggattcatttttagccatacttgtcacacaggtgcatttgtaagatactgagtatggatggagaagagaatgtgtacagcataatttaataattaaaaataactaaaagcataacagttcaagtatcagctggccttcacccaaccctatttgcggtattccttttagtttccctgtcttatctgttcttggtcttaagacaaacttcattttccataccctgattggtaaaactctcattctgatcccaatgatagcaaaacatataaacattaaacatacctttcgaaaaattatatttataacccagcacatctatctttctcagacatatatacacttaagttatggtacttatctgaatttttatgtactggtaatagtagatgtgattgggcttttgaatctgtgttgtattttatgcgtgtttcaaactatgaattacatgaattcatatatatttatctcccttcggtagctcttctttaattttgcagtggaaataaatcatttttctccactgcatcttattgacactgggtttgaaactctgaagctttgggggtagtagtttacaaagaatgagttttattaactaaaatttatttcagaaaaaaagtagaagtgtacttgaaaccactcttcccatttttccactcagcaatttaagccctcagaggattcatgctgtagggaacttttctaataaaccatggtttctctttttttattttattttattttattttattttattttattttattttttttttgcgacagtctcgctctgtcacccaggctggagtgcagtggtgctatctcggctcactgcaacctccacctcctgggctcaagcagttctccgcctcagcctcccaaatagctgggactacaggcgcccaccaccatgcccagctatttttttttttttgtattttttagtagagatggggtttcaccatgttggccaggctagtctcgaacttctgacctcaggtgatccactcaccttggcctcccaaagtggattacagcactgataactaggcagctagctagaagaacattttatatatccatatcagttcattttccttacccctagacactctatcatagtaccccccctccattctgatcttatgtgttaaataacttgttattcaagaaactaagtaatatgtgtttctgtgagatttagcattctgtaattgtattagcaaatgtggcttttggatttaaagaatgggtgaaacaacaatgactaagtccctggcctttatggaaatggcattattgctagctgatcatctgcgggtggtgaacatggtaaattaataaatggaaacacaatattaatattgactatattgctcactaagagaatctcagccttccaaacatagcttccataggaaaaaacagtagaatcaaatttaagttttaaatgcttctttacttttaaaattcatgatttatactgcttatcaaatattttaagggcaagatcatgacttttcactttactgaaaatagcaccagtgcttatttgactagacaaatattctaccttccttgtaatggggaataggaataactttttgaattactaggtgttccacatagatctgtaagtggaatatataaaggctttaataaagtagaataacttttaaacctgtagtctggatacaagatttttgttcttcaggacaatcccaaggtgaaaaggtttgtggattgttgttttctttttttttttttttttgagacagagtctcactctgtcaccaggctggagtgcagtggtgagatctcggctcgctgaacctcctgggttcaagcaattctcctgcctcagcctcctgagtagctgggactacaggcgcgcaccaccacgcccagctgatttttgtaattttagtagagacggggtttcaccatgttggccaggatggtcttgatctcttgatctcgtgatccgcccaccttggcctcccaaagtgctgggattacaggcgtgagccaccgctcccggccagattgctgttttttaatgttttgtttttgttttaataaaccatggtttctctttttttaatttttttttttttgagacagtctcactctgtcacccaggctggagtgcagtggtgctgtctcggctcactgcaacctccgcctcctgggttcaagcaattctctgcctcagcctcctgagtagctgggattacagacatgtgccaccacgcctggctaattttttttttttttttggattttttagtagagatggggtttcaccacgttggccaggctggtctcgaacttctgacctcaggtgatccgttcaccttggcctcccaaagtgctgggattacaggcgtgagccactgcgcccagactataaaccatagtttctctgtaccaaaagtggtatgtccttcttgagccaggaatatttcactgttcttagtttacctgttgactctgaacacagtttttcatacactgtaaataactctcccaggctgccatcttggaatatgcaaatctgtcgcatctatgtagttatgcatatcgcatttttgtcaaacttttaacttgcatttcttactgtgaaaagtcagggcagggattctatgagttttttctttaaagttcctacaatgaaatgttttgattaaaccttttttggcattcaaattgagattgatttaatgatgtgtgtagtaggctagaaattatgatgaagtgacgatgccatccttatttatcttcagcattcacatctaaagttttaagaagaaaactggcaaatccacctttttaggcttaccatcctcagtccctgtggctttgggtttttttgagaaatttgtcaaagaaacgctatgttagaatttgacattgaggaagccaagcatatttcctctgaatagataatgtgaaatgtgatataatgtattagaatttcatcttcactttggcaagcaagatacttgcaaccatgttcatgcaactatcttcccttattgcttttctcttcttaaccttggttctaaagttttcttcttattgtattaattttgttatgcttcccatttatatgagtcaagtcaaccttacttgatttcttatatatgagttatgtaaggaaaacttatcttttcttatagaattaggggatgaatgagcagatagaaccaacatgaacagggcgatcctaaaaatcattcaaaacatgtaagctctcccaactctgaataaacttgtgatatcttcataatgaataaggtatactgcctatagtaggaagaggaaaatttattaatgttttgtgcattgttaaagaactacaaatgaattgccgtgtggaggctttcattgttgttgttgtaaaaatgctatgtgtattaagtaagcctttgatggagaagaaaaaacaaagaaaaaatatttaatccttcataaatctgggttaaatatgaagctaattcctgttatttggagtaaccagggttttatctagtttacaaagcatgcaattgcaatgtttaaaagcatatgatttggcctttaatatctgaaaatatgtctatcaaaggccatattatagcgagtgtcactccatactttataagtacggtatatttttaatagaatgtttatgtactggtgataagagatgttactgggtttctaaaccagtactgtattaaggattttatgctattgtaagattatggattatgtgaattcatatatattgatttactttcagtagcttttcaatagaatatctagggtttaatacagcttagaaactaaagcaggaattattcatctttaaaatcctgaccaaagaagtggctggcaagatggctgaataggaacagctcaggtgcgcagcccctagtgagatcaacacagaaggtgggtgatttctgcatttccaactgcagtacccggctcatctcactgggactggttagacagtgggtgcagcccacagagggcgcagaagcacggtgggatgtcgcctcaccccggaagcacaaggggtcagggaattccctcccctagccaacagaagccgtgagggactgtgccctgaggaacggagcattccagcccagacactatgcttttcccacagcctccgcaacatgcagaccaggagattccctcgggtgcctacgccaccagggccctgggtttcaagcacaaaattgggcagctgtttgggcagacaccgagctagctgcaggcgtttttttcatatcccagcgtcacctggaacaccagcgagatagaaccattcactcccctggaaaggggactgaagtcagggagccaagtggtctagctcagtggatcccacccccaacggagcccagccagctaagatccactggcttgaaattctcgctgccagcacagcagtctgaagtggacctgggatactcaagcttagtgtggggaggggcacctgccattactgaagcttgagtaggcagttttcccctcacagtgtaaacaaagccgtcaagaagttctaactgggcggagctcaccgcagctcggcaaagccactgtagccagattgcctctctagattccttctctctgggcagggcatctctgaaagaaaggcagcagccccagtcaggggcttatagataaaactcccatctccctgggacagagcaccacggggaaggggcagctgtgggtgcagcatcagcagacttaaacgttcctgcctgctggctctgaagagagcagcagatctcccagcacagcactcgagctctgctaagggacagactgccttctcaagtggggtcctgacccccgtgcctcctgactgggagacacctcccagcaggggttgacagacaccctcatacaggagagctctggctggcatctggcaggtgcccctctgggatgaagcttccagaggaaggaacagacagcaatctttgctgttctgcagcttctgctggtgatactcaggcaaacagggtctggagtggacctccagcaaattccagcagacctgcagcagagggttcctgactgctagcatcaacatcaacaaaaaggacgtccacacaaaaaccccatctgaaggtcaccaacatcaaagaccaaaggtagataaatccacgaagatgaggaaaaaccagcacaaaaagcctgaaaattccaaaaaccggaacgcctcttctcctccaaatgatcacaactcctctccagcaagggaacaaaactggatggagaatgagtttgacgaattgacggaagtaggcttcagaaggtgggtaataacaaactcttacgagctaaaggagcgtgttctaacccaatgcaaggaagctaagaaccttaaaaaaaaggttagaggaattgctaactagaataaccagtttagagaggaacataaatgacctgaaggagctgagaaacacagcacgagaactttgtgaagcatacacaagtatcaatagccaaatcgaccaagcaaaagaaaggatatcagagactgaagatcaacttaatgaaataaagcatgaagagaagattactgaaaaaagaatgaaaaggaacaaacaaagccttcaagaaatatgggacgatgtgaaaagaccaaacctacatttgattggtgtacctgaaagtgatggggagaatggaaccaagttggaaaacactcttcaggttattatccaggagaacttccccaacctagcaagacaggccaacattcaaattcaggaaatatggagaacaccacaaagatactccttgagaagagcaacccaagacacataataatcggattcaccaaggttgaaatgaaggaaaaaatgttaagggcagccagagagaaaggtcaggctaccccaaaggaaagcccatcagactaacagcggatcatttggcagaaaccctacaagccagaagagagtgggggccaatattcaacattcttaaagaaaagaattttcaacccagaatttcatatccagccaaactaagcttcataagcaaagtagaaataaaatcctttacagacaagcaaatgctgagagattttgtcaccaccaggcctgccttacaagagcttctaatgaaggaagcactaaatatggaaaggaaaaactggtaccagccatggtaaaaacataacaaattgtaaagaccatcacactatgaagaaactgcatcaactaacgggcaaagtaaccagctagcatcataatgacaggatcaaattcacacataacaatattaaccttaaatgtaaacaggctaaatgccccaattaaaagacacagactggcaaattggataaagactcaagacccatcagtgtgctgtattcagaagacccacctcatgtgcagagacacacataggctcaaaataaagggatcgatgaatatttaccaagcagcaaatggaaagaaaaaaaaagcaggggttgcaatcctagtctcagacaaaacagactttaaaccaataaagatcaaaaaggacaaaaaaaatggtattacataatggtaaagtgatcaatgcaacaagaagagctaactatcctaaatatatatgcacccaatataggagcacccggattcataaagtaagttcttagagacctacaaagagacatagatgcccatacaataatagtgggagattttaacaccccactgtcaatattagacggatcaacgaaacagaaaattaacaaggatattcaggacttaaactcagctctggaccaagtggacttaatagacatctacagaactccccaccccaaatcaacagaatatacattattctcagcaccacatcacacttattataaaattgaccacataattggaagtaaaacactcctcagcaaatgcaaaaaaacagaaatcataagagtctctcagaccacagtacaatcaaattagaactcaggattaagaaactcactcaaaaccacacaactacatggaaactgagcaacctgctcctgaatgactgctggataaataaggaaattaaggcagaaatgaataagttctttcaaaccaatgagaataaatacacaacggaccagaatctctgggacacagctaaagcagtatttagagggaaatttacagcattaaaatccccacaggagaaagcaggaaatatctaaaattgacaccttaacatcacaattaaaagaagtagagaagcaagagcaaacaaattccaaagctagcagaagagaagaaataactacgatcagagcagaactgaaggagatagagacatgagaaatccttcaaaaaatcaatgaagccaggggctggttttttgaaaagattaacaaaatagatagactgctagccagactaataaagaagaaaagagagaagaatcagacagacacaagaaaaaatgataaaggggatattagctctcatcccacagaaatacaaactaccatcagagaatactataaacacctctacgcaaataaactagaaaatctagaagaaattgattaatttctggacacatacaccctcccaagactaaaccaggaagaaatcgaatccctgaatagaccaataacgagttctgaaattgaggcagtaattaatagcctaccaaccaaaaaaagcccaggaacagatggattcacagctgaattctaccagaggtacaaagaggagctggtaccattccttctgaaactattctaaacaataggaaaagagggactcctccctaactctttttatgaggccagcatcatcctgataccaaaacctggcagagacacaacagacaaagaaaatttcaggccaatatccctgatgaacatcaatgcgaaaatcctcaataaaatactggcaaaccgaatccagcagcacatgaaaaagcttatccagcatgatcaagttggcttcatccctgggatgccaggctggttcaacatacagaaatcaataaacataatccatcacttaaacagaaccaatgacaaaaaccacatgattatctcaatagaagcggaaaaggccttcaataaaattcaacaccccttcatgctaaaaactctcaataaattaggtactgatggaacgtatctcaaaataataagagctacttatgacaaacccacagccattatcatactgaatgggcaaaagctggaagcactccctttaaaaaccggcacaagacaaggatgccctctcccaccactcgtattcaacataatattggaagttttggccaggacaatcaggcaagggaaagaaataaagggtattcaaataggaagagaggaagtcagattgtctctgtttgcagctgacatgattgtatatttagaaaaccccatcgtctcaacccaaaatcttcttaagctgataagcaacttcagcaaagtctcaggatacaaaatcaatgtggaaaaatagtaagcattcctatacgccaataatagacaaagagagtgccaaatcatgagtgaattcccattcacaattgcttcaaagagaataaaatacctaggaatacaacttagaagggatgtgaaagacctcttcaaggagaactacaaaccactgctcaaggaaatgagagaggacaccacaaacaaatggaagaacattccatgctcatggataggaagaatcaatatcgtgaaaatggccatactgtccaaagtaatttatagattcaatgcagtctccatcaagctaccattgactttcttcacataattagaaaaactactttaaatttcatatggaaccaaaaaagagcccacatagccaagtcaatcctaagcaaaaagaacaaagctggaggcatcatgctacctgacttcaaactatactacaaggcttcagtaaccaaaacagtatggtattggtaccaaaacagatatatagaccaatggaacagaggcctcagaaataatgccacacatctacaaccatctgatctttgacaaacctgacaaaaacaagcaatggagaaaggattccctattcagtaaatggtgctgggtaaaccggctagccatctacagaaaactgaaactggaccccttccttacaccttatacaaaaattaactcaagacttaaacataaaacctaaaaccataaaaaccctagaagaaaacctaggcaataccattcaggatataggcatgggcaaagacttcacgactaaaacaccaaaagcaatggcaacaaaagccaaaattgacaaatggaatctaattaaactaaagagcttctgcacagcaaaagaaactatcatcagagtgaacaagcaacctacagaatgggagaaaatgtttgccatctattcatctgacaaagggctgatatccagaatctacaaggaacttaaacaaatttacaagaaaaaacctaatcaaaaattgggcaaaggatatgaacagacacttctcaaagtaagacatttatgcggccaacaaacatgaaaaaaagctcatcatcactggtgattagagaaatgcaaatcaaaacacaccagttacaatggcgatcattaaaaagtcaggaaacatcaggtgctggggaagatgtggagaaataggtgtgcttttacactgttggtgggagtgtaaattagttcaaccattgtggaagacagtgtggcaattcctcaaggatctagaaccagaagtaccatttgatccagcaatcccattactggttatatacccaaaggattataaatcattctactataaagacacatgcacatgtatgtttgttgcagcactgttcacaatagcaaagacttggaaccaacccaaatgctcatcaatgatagactggataaagaaaacgtggcacagatacaccatggaatactatgcagccataagaaaggatgagttcatgtccttggcagggacatggatgaagctggaagccatcaatctcagcaaactaacacaggaacagaaaaccaggcaccgcatgttctcactcgtaagtgggagttgaacaacgagagcccatggacacagggacgggaacatcacacaccggggcctgtcgaggggtgggaggttaggggagggatagcagtaagagaaatacctaatgtagatgacaggttgatgggtgcagcaaaccaccatggcatgtgtatacctatgtaacaaacctgcacgttctgcacatgtatcccagaacttaaagtataataataataaaaaaaaaatcctgaccaaattatttattcaatgtgaaattaattgtaagttagtgttgccaggagagcttattacttagttaccatgtattccctctcatctcctgctttgtttataaagctaaaagcaaattacttaggacagcaatgtcaaatcactttctttccccaaagcatctgattttagatagcgctgtgtgtgttttaaaagcccctacctcgacttaggcaaacagaaccttcgtttaccatgctattcccatcccgcctttgaaacttctgaaaaggcagagcggagtaattgtttcagacatctgcttagcatactttgaagtgcatataagttctttttcagtttcatttgaaccccagctgtcttcaccgaagtctataatcaatctgaattaagttgtcctacttctcctaataagtctcttattaagttctgcatcagcctcttagggagacttaaaagctaattcatgtagaattgccattttctactaattcacttgtcagctctccaaattccaacaaaaacaattgcaaagactattaatttggctcttcataaacaacttatgtaagtgtagtatacattggaaccaaacaaacgatttaaaacagtgggtgggaggaaatgagttgatggcattcaaaacgcttccttttttgactgttatgaaatgccttccacatcgaaagcataaagccatttatttaataagggaaacatccttctgcttttactttcatagatgagataatgactgaatgaactttgcttaaagacaggaaaaggctttagaacagttggaaaaggaacatgttctttttgtcattgaacttattttaatttggacttctttgtgttattttgatggactgtgataaaagaaggagctagaattggttattattgttattggattaaatcagagttgtacagctactcttctggtcatgggatatttaggagaacacgggtaatcaaaatgttcagctaatgagttcatctgattctactcaagaagtgtttaatcagataataaaaatttctccaaataataccatccttcctactatttgaaaacaaccatatcaacatctgatcctataatatgccaatcctgtttgctaggattttctgaaagctttgtttgtggtgggtaataactagaaatactattcctcaagagtctcgggtaataaaagattattcaaaaaacttaagtaatatactctcagtattagaggatatacaaatgcactcattcattaattcatgatatgattgaaacctatacccagagaagtctgatctcattatagagtgtgaacatttaatttatttcaaaaacaaaaattatattgagagttgtatagatggcatcttagttttcctgggaatattattatttagcaccaagctgagggagcaagaatttgtattagcttgtgtatacatgtgcatgtaccacattaactagaaacagtgctaaaatgtgagttatttatttaactgaaattccatatttcctaagaaaatggaatcacacagccaatatatatttttaattattttttgacatctaccaaagttgtgacaagaataaagttcacaattctgttactctcctaccgttcagtaaaacaggaaatgctttaagatcaaataacccaaggagttcgcttcttcctgtcatgcttgacaattacaattttcaaaatttaacagttagcattgacaccagtattatgccttacacaacctgaaattaactaagttaagtaatggcattgaataatttttcttggtaaatcagttttctgggtattatgggaacagttgtgtctgtgatactaatgtctctctcattttaatggggcctaagaaagaactttttcataataagattttttcatgttaaaataatatttttagttatagtttacacttactgcaggtttttctatttaaaagcatcttccgagagcagtgattcttaaacttatttacttcagttatcttaacagcatagaagacatagcctgacatctcccgcttccacttacctatctcctttttccatgagcatgaaatttctttgatgttcttgttttattttttaaatctcacatcaattttatggtattttccataatggattcatcatgttttaatatgaagatgctttttcttcaaattctgaagtaaggaatctttcagcacattcacctatggacatgaaagcgtaagttgagaatcacagtataaaggattgcccagtttttgcaggctttatctttttccatcaacttctgtcttttatgtacacagacaaaaagagcagacccttgctatttcaaatttatcttttgcaggttcatctgattattgtgatccaaagttccatgactagcagctcttaattttgaacatgtattatttcaagcttttgtgcatagtcacttaactaatgagttaaatggcattttaagtcaggttccatgaacgcagaccctgagaacaggggtctaggtgcctgtgatttatagagggtctgctctcaggagaagcctgtattggagttagggaaacaatacaggagaagaaagagcccagcaagtatgccatttcaggtgaaacctcacattgtgtctgatccagagagagagcaagccctcgagcagaaacctcgctgtggagttgtactctttattttattttatttttttgagatggagtttcgctcttgttgcccaggctggagtgcaatctcagctcactgcaacctccgcctcccaggttcaagtgattctcctgcctcagcctcctgagtagctgggattacaggcatgcaccgccacgcctggctaatttttgtgtttttagtagagatggggtttcaccatgttagtcaggctggtcttgaactcctgacctcaggtgatctgcccacctcagcctcccaaagtgctgggattacaggcgtaagccacaacaccgagccggagttgtgcctttataccagtcattgtctgtgtcactgaagtgctggcaaatatttgtcgactagctctgaggtgggatgaatcctggtgtgtatcaaaaccagttttcgtggtgtaaatactccctctaccactgatctccagctaccgacataatgccactgagtatggaattgggaggagatgcacacaattggctcttgggctctgctgcagcacaccactggctgtggtccactcctgggatatgggttacttcctgggctagggggctcccataagcagaggtcacatgtggagaaggcaggtagctataagacattaatagtcaaccatcacagcagctgaaggatggatgcccaggttaggtaaagtgtcccctgcaactaataagtaaacctagtaatccactcactcttcatattcaacttggctttttttaatgctgttttgtttttgcatgtacagtaattctttataaataatgagaattttgtttctttatggaaaatccacctaccctccaccctaccatgaatagcttgatagctgttcatcagaattagtgatggaagagaagagttaatgaatgaaaaagtctaagaaagtgatcactattagtaagaaaatggcctcataagtgagtttggctttatagttatggaatctgtaaatgtctaggcattcagacatgtccagacatcattgagaatgtcaagaattttcagtggcaatggttctcacctcagcatacatcagaatcacctggagggcttgtagaaactcaggttggtgaaccccttccccagagttcctgattcaaaatgtctggggcaaggctaagaagtcccaacttgttcccaggtgttcatgatgctgctggttcagagatacattctgagaaccaatattccatagtaaagctactgtgtatgtacctgaagacatattttgtgtagtgttagcgtttcttcaattacaagtaataaatatatcatttattatttcttttatatttatcaatatccagaagatttagtttaaaaatgaatgcaggcacacagcctcttgttggattgattaatagtttagatatgggagcatcatagggagcattgtttcgcttaggaaccttgaaatgaataaatggcttcttttctaaatctcacttgtggaagactttgacggtggtttatttcattttttcctgttggtattttaatgacactggtacaattttggggttgcttcagatgaccaacagcataacttgccttcccagtattaatttttaacgttaaaaatatttagtcatggccggccgtggtggctcacgcctgtaatcccagcactttgggaggccgaggtgggtgggttgcatgagctcaggagtttaagaccagcctggacaacatagtgaaacctcgtttggacaaaaaatacaaaaattaaccaggtgtggtggcatgtgtctgtagtcccagctacccgaaaggctggggcaggaggactgtttgagcacaggaggttgaggctgcagtgtgccctgttcactccactgtactccaggctgagtgacaaagcaagaccttgtctcaaactatatatatatttagtcacataacttttcactttgtgtaaatattttttgcatttaccaataaaaacaattacatttaaaaattctccttacacttttctaccaaacatactgatgataaaatagtactttatagagtttctgaatctaggatattaaaaatagttgggatcagtcaacactttttaagtaaaatctacttgctagatatgaatagctaacagcttctccaggagtgcctacattttataacttactttgtccaccccttgaggctctgtgttcagggggagggtatatttttgtgtatagaaatagagatgaggtgaaatagagatgaaatagagatgatgtgggatcaactgggagaaagtagaaaagagtcttagctgaagtggttgaggaaggaggatttttcccaaaatggtgcaaaaaacaatgtattaaatatctgtgaaaaagttcatggttgtggtatagggtgagtggtatatgaaaagagaattatgggataaactaatggaaacagatgtcttaaaatttgcttttaactttaaacaagagacatgaaacttaaacttttcccttatcctagaatctgggagaggagaaggatgagaaaaaatgaaattttacattagaagcaatttgattaatgttcaatggaaaatggaaatagctatggtcaaacccactcaaatcaagtgtacattaaataattgagttaactgaattaggcagagtaagggcacattgattttcagtgttgttgaaaattggtccacatatcattgttatgctttttgtttgtaaacctcaatatttattaagtttccacagtgtgctcagccctgaaacgccaaattctcttaaccagaatgaggctggaggatctaacactaagacagatttctattttcttttaaggaattgatttttatggtaattttttttcttcataaagttaagaacctgccagtcctgtttcgaaacacacttatttttagaagtttggttttccgggattatgcatcattatagactcaaatgactcatttagaacttttccctatcaaatattcacattctatcatcatgatcttaacacggcataagcaagttagtgaacagagtgaagtcaatttattggcaatatatgccgaagtacaggaattaagtagaaacaaaagtgaatgagagtctttggcaatacattgatgtgttttttttagaaccaatgataaactactgctgagtttcctttcatttacttttttcctactcttaaaacattgtaacccattttgagatctatccattgttgtgaacctaaagcctattaggtcttattaaataatacccatttaactgacctgtgatttaagtttcttatctgcccccaagcaagcagactgtatgcaacggcattttacctgcttcaccttctgcttgccagttggtttttggtcttcacatgtttctagcagggatggggctaaagcaagggagagaatggtccattgttttagactttcacaaacccaatatactagaatctccacaaaggttatccaatatcagggtgacttttgtgcatccaataaagcataaggttaaaagaaatacaggctaaacaaatgagcataaattactccgttggcttatgctgtgaataaaatattacctttggaaccatctcaattttttttttgtataaaggttgaaggaagacatttgcaaagtcgtttctcctataaaactgcctagggtttggggttgattgttgtatgcaagaggggtcttggtgaaatctgacccactttgaatctaaaattactgaattattagtgaaaagattattttaaaaagagttttgaactctttttcctactgaaattgtattctcctttagataatcaatgcagcatcacccccacagatttttgagggcactaaatcatactcctattttgaaaaagaaaaaagtctattactattaaatatatctgttagttgaatatcaatcactttttctaaagggtagatttggccaatgagtgatttttttttttttttttttttggaaatcacatctgagaacgttgtttagacagcttgacacttagactcatttgtgtaagtagtaatttattcatcatttgcatgtacttaactggacattatcatgatagcagttgtcataacagactattacaggatatgaatttagatattaccttaagatgtgatcataaaaatcagaataatatcttgaaaatatcaattttatggtgagaaaaatgacaaactgaataaactcttgactcaagaagctagacttttcacaacctcatgtattcacagaagtaaaaataacaactaataatgtgtccagagggcccacattgctcagaaatgaatacataagactttcttttcagcctcagaatatgatgaaaagaagatgaaccattatgatgttgcatagattttaatgaagaaaattcgttttctgttcctttcgtttgactttaagtagttgaacatcctgcttttttattttgtttgcaagaaataagaccattttagaaaggctaaaaacattaattacatttaggaactacaataatctgaaagtaaaattggatattaaaggacgtttttgcaatcctttttagccctcttctgtgtattatttttatcactgctcttaaaaatttgtattaatctttggttcatttctgccttagtatttctaagttaataatatattgaatgaaaaatcaaatcagtaaaaatccattttgtttcagtagtgagtgccttccccctagaaccaaaactaaataaatgtgctccatataaagcaaaccaggtacagcatattgcacgggtaactcacaattctagattcctctattaatcattattcagacatgcagaggtagcttaatttgctttaataagtgaaaacagaatctctttgagactgctatctgcaatattatactttgtcctgcattttcttggtcaaaaattgtattttatagccatgatatattttggcttggaatttgcttctttataagcctagttattaatagtcatcatttaaatgaaatgatatccattagccttaagctgcatgattacagagacttggtctatcttacgctgtatttccagtgcctagaacattccctggcatataataggtacccaataatagtttttggaataaatgaataaacaaatttgtgcaaaagcatagggcaaaatgctatcttttagatagcgtgacccttaaaaattattttgcaaataatttgctccatttgccaccagcttatttctggccattgttacttcttgtctctgcatacaaacactctgtgtctcttctcctttccacaatgaccacaagttatactgatctacttgagattttccaggtgactatttcatgtccagaggaacatgcctcttctagtgttcccctctgtgaatgatttcagtcaccttatctactcaggaggtctctcttcccctccatcagcatctttctctgcaccttccaaacccctatgactcaacttctcataatatggattgcattttttttaatgacccattaaattgtgtacctctgctaatgattgtgagtgtgttgagacttccatttttccagtggatgataggtatataatatatatatatatacacacacacacacacacacacacacacacacacacacacatatatgtgggcacagtatctagtggatataaagtaagtgttttcaagtgagtagtaattaaatctaagagttgccgagaaaatgccattcccgttttgtggacatcttcattctacattgtaaaggccacctcattcaagacccaccacaatcttgatcccagaaaacacccatgattcatcttttacagctgccctgtacttcatattttaagttattaaaggctatttgcttttcctcagacacacattaaactttcctacctcttaccctttgttcaagttctgaacacatatctttcttccccacactatgcttcctctttatcagtttcatgtacctactttccaatgtctagttcgaggagacgtttataaggctacatgatagaggttgcccctggggcgatgtgagaaatcagctccaaaaaggtagctacccggcaaaggatcttagtctgtgactctctcatggatgaacttattacctactgctttgcagagtctccctggactagcctgaataggaacttgtgtgactatatgtgaactaaaagaaggagaaatatgcctaaacttctcatccatctttgtaacagccctaaagtatgcatgttactatcccttttctacacaagtggaaaatatttgtaaatgaacttcgttacagtctaatatttgatgacttcttagttcatatcattatttaagtaacttttctttagtggaaaagcccaaaaattagggaggcagggagagagagagagagagagagagggatcatctgtaatctcagccccagcatctataatcccaatccctgcaagggcctctttgggcaaagaagaaaaaggcactgtgtttttgaagagatccccggtcctatgccaagcctaaccaatttggtagtagagcccaggctggatttcagttggtttgtagtcttctagtcttttcatatgtaaatatttttaatgcttttattcagtgttgttaaaatgccctccaaaagatgcactaacttgtgccaccaccaccaagcagaatatattttccttgaataggctacttcctctttttttcccactcactccatttttattttaaaaatccctggtagagaccaaaaactgaaatgttatattcttgcccaaagaatgagagatgcttcagaaattagcaaatgctccaatataaatcaagtgatagatataaataattcagatatgggataaggaaaatgggtagctttctcttatttaggaactctatgtcaggtttctgtgagaaactgtttacgaagcagtctgacaatagctattggtctgaagtattagtaattagtacagaagtgcctaattctcttgactgcttgttctttaataaaaatgtattgagggattatcatgtactatggcttggcatatactggtgaaaaacaataatgtaggattgccttaataaattttctggtcttgggaaggaacagacaatgaataaatgaataggcaaatatatatgtacttgcaaattgtgatcagggttcagaaggaaaatagggtgttgagagtcaaggaaaaaggagacactttacgtagggcaaccaactgggaataggctatctttaaaagtcacatctaactgagatcagaagtatatgaataagagccagctaggcataaagtggatatataaaactccaagcagagggaacagtgtatctgaaggttctaagtcaagagtaagcttgggccaggcacggtggctcatgcttgtaatcccaacactttgggaggccgaagtgggaggatcacttgagcccaggagtttgagaccagcctggaaaacatagagagatcccatctcgcaaaaaaaaaaaaaaaaaagaaaaagaaaaaactaacttaaaaatatatatatatcaatgccagtggtgtgtgcttgtagtcctggctaacttgggaggctgaagcaggaggatcgcttgagcccaggagtttgaggctgcagtgagctatgatcgcactgctgcactccagcctgggcgacagaaagaggccctgtctgaaaaataaaataaaaataaataaagaaataaaaagcttgatgagttctaggaactcaacattttctaacttcttattagaaatgccaaattctcaggcccaccttacacccactgaatcaaaagcactaagtgggactcagcagtctctgtgttaacaagccttccacatgacaatgagatgcacactattgtgtgagaatcactgccttagactgatgttttgagctatttaggggagggagagggcccattcagggacaatggtggttaacacatgtggctcagaccaagaaatgattgcaagcccaaaaacttgttaaatgtaaaacttcaggcgcagtggctcacgcctgtaatcccagcactttgggaggccgaggcgggtggatcatctgatgtcaggagttcaagaccagcctggccaacaaggtgaaacccagtctctagtaaaaatagaaaaattagccaggcatggtggtggtgtgcgcctgtaatcccagctacttgggaggttgaagcaggagaatcgcttgaacccacgaggcggaggttgcagtgagcccagatcgcaccattgcactccagccggggcgacaagagcaaaactctatctcaaaaaaaaagtaaaacttcatctgtctgaagtaacttctgaatttgaagataaacatcctcatggttgatattttaatggtttatggattattacttacttttaaggaagttaataggtttcattaactgccattttgcttcattttgtcacatataattaaaatttttcagacagaaaatattggtattttttctgtttccttagcaacctaaagcatgacctgcttaaatgacttatttgtgctcattaaaagcctttttgtgttaattgtgtatattttgtatttagcctctgtgaaacactcatgaactatctttttatttgttttaattgtgtcattggaaagcttgaagtattttgtggtttttttttttttttttttttttttgcttgttttttgtctataaaggggagataactggcagttgcagttaggattatagaaacattttcccaaggaaattaataaaatttgttcaagtttcttcttttacaaattgtacttatttttgattttttaaatagtggtaaaatacaaattacatgaagtttactatcttggctctatttaaatgtatacttccatggcattacatacatttacgttgttctgctgccatcaccaccatccatctccagaactcttctcatcttgcaaaactgaaactctatgtctattcaacgataatccccaccaggcatggtggctcacacctgtaatctcaacactttgggaggccaaggcaggcggatcacctgaggccaggagttcgagaccagcctggccaacatggtaaaaccccatctctactaaaaatacaaaaattagctgggcgtggtggtgcacacctgtaatcccagctacttgggaggctgaggcagcagaattgcttgaacctgggaggcggaggttgcagtgagctgagatcgagatcacaccactgcactccagcctgggcaacagagcgagactccatctcaaaaggaacaaaaaagaaaaaaccacagtaattccccattgcttcctgcccccagcccctggaaaccaccattctatttcctgtctataaatctgaatactcatttctatatcttctttggagaaatgtctattcaggttacttgctcattttttagtcaggtgatttgttttcttgctattgagttgtaggagttccttgtgtattttgaatactgaccccttaccgggtgtatggtttgcaaaatatcaattgctcctgctatgttcaacttgttcttaaaaataaaaacttttcctttgtggtcaatacttccctgttcctcatttccaaattttatacatgaaggaaatgtgagcacccagaaaagaaagaagatagacactgttaatatggccaagatataattcggcttttattataagaacattggagttacaagcttcatagaaagccatgtcctaaaagatgaagaattatgatcagtgcaaagagaaaatgttaaaaagaaaaagttatccttttatgtttgggtatatattctttttcgatattgtaaagagaaactagagttttttgttcttgtttttgagacagagttttgctcttgttgcccaggctggagtgcaatgttgcaatctcagctcactgcaacctccacctcccgggttcaagcaattctcctgcctcagcctccagagtggctgggattacaggtgtgcaccaccatgcccggctaatttttctgtttttagtagagacagggtttcactgtgttggccaggctcgtctgtaactcctgacctcaggtgatccacccacctcagcctcccaaagtgctaggattacaggcgtgagccaccgcacctggttgagattgttttttataaaaagatgtggattctttatggaaaacacagagcagttaattgctatttttttaatgtcacaaatttggaagcgtgttgagtctgagaagaaaccatagttaaaatataattactgataatcgcttgggaaataaaagccctaaatttcttcatgcctacaaacttaatattgttttcccaagatcttttttttgactttaacctttcttaagtgtttctgattatgctaaatctaggccattagttctgagtctgtttcattatttatattgttattcagtttactcgtcaaaagtgatcatgcccaaatatgaaagtttacaagaattgccctgaaaactgaacggaaggagacaacgaaaagaaactgcataatattttgccttcaggctatcacaataaaaactgttgctggaaaaaaatgcaatcacatcccttttttttttttaaagtacgtttcaatggcataatttattgtcgagaatgtctctaccagaagcataagtgatactaaaggcagagggttgtattcgctcagtctgcaaagtatcccctttgtcttagctccacacagtccctcagaatttggcagaaatgagggactcaactttcgagaaagggtgacaatcccagttttgttggagagctatgaaatagccccatagtgttagtaatgaaaattcacttaagaagtctcctgcaggcccggcacggtggctcaggcctgtaatcccagcactttgggaggcctacgtgggtggatcacctgaggtcaagagttcaagaccagcctggccaacatggtgaaaccccatctcttctaaaaatacaaaattagccaggcgtggtggcgggcacctgtaatcccagctactcaggaggctgaggcaggagaatcacttgaacccaggaggtagaagttgcagtgagccgagatcgtgccattgtactccagcctgggcagcaagagtgaaactccaccttggaaaaaaaaaaaaaaaaaggaaagaaaggaaggaaaggaaggaaggaaggaaggaaagaaaaaagagaaagaagtctcttgaaaaaaagaaaggaagaaagaaagaaagaaagaagtctcctgtataaaaaaaggaaagaaagaaaagaaggaaggaaggaagaaaagaaaagaaaagtctcctgaaaaaaaaaaaaaaacaaaatataagtgcttgacaactgaagttcaagggtaaaggctattgggaaagcagatgaagttaatctaagtaatggatgctgttggtgccccagtcagattcgttcactgggttggtgcacccattcctcagtgactctgagtattagctgctaaagcctcatggtttcacccctttccagagaacctccctcagccaaaaggaagccaccttgactggcatgtcccaccacaccttctctcttaaaaccaccaggggtacaaagggaaaacccctttgcctcatcatggcacctgctgttgtacaatttgtgatctgggaattcccatggggccagattgatgctggtctccagcccataccacatcccaacttaactttcttgccctgtcttcctgcttctctcactccctttttcttaagagcactcagactctgcttctcttaaacctggctgaaggcagtaggtatctgaaagaaaagctgtacctacattctgggcatcagagcagtcagggaaccaaccagaatgaaaagtcaaaaattacagataatgatggaagtctctgagcctgatacatttcatgaagggcttgcttacagctcaacttgtgtttctttttaattgtttcaacagcatttgagtagctcattccgcccaggtatttgagagattccagtaggcctctgatcctctggaaaaagcaagatacagtccttgactctcttggccccatgaggatgatatatctgctgagaaatgcaggagctgcaaaacatagctgggctgtacctgctgccaattcccgggtaattgcattctgtgagggcttccctgaaccacgaggaagagccccggaataagtactaaacaccagtatttataggacatgatttctaattgctcatccttgccttctcatgactagctcagcatgaagaatgctgggacttttctttcctagcacctcctctttttaggctgttttccaagagtcttggttaacaaacatttgtttgacaaggattcatggtagacagcaatgccattagtccctacttaagtaatatttgtaacataaatttctctgcacgtgtatgtagcccaagaataacacttcatttttggaacctagtaattttgaattcctagtaagtgagataggacgtctatgagttagcaggttaagattttaggaggaatatttaatatccctaagaagggaagtttttcaaacactgagtagcactatatatatttatatatatatagccagatttctatctatctatctatctatatatatatatatatatatatatatatatatatcacaccatttataaataaactcataagtggcaaatccagtagagctaatctgagcatcccagagtctcccctctctgtcgcttgtttgtgcagctactcctgctgtggccttttatggattatcctggacttctacaactgacccctctactttctctccatctacaagcttcattttgctttgctttcctcctaatccagtttagattccacagtatattttttcaattacatcctggctaatatcgaaactcccttatccctaaatgtgtgagccacagtcatctgacgaaaccccaaacctggatcaactgttttccccatgcttacatgcaacactgttggagaaaatgagaaagtcaggcagattggttctgctaaaaaatgttgaacctcatcctcaagtgggccctcaacactgtttgccaacctcattacatctcttaggtcaactccctctcacagtctctattacgattaattcaaatgttcccacttacccttaattcatgttttcattcagtgactattcattgcacaccaggcactgcacgctatgccaggcactgcagactatgccaggtctgttgattcctacttcacagaggaaataaaacccctccaagcagaattccctcaatttactctttctagtctttccaactgaccttctgtgctttgcagtaggaatgttctcttaactgtcaagtcaaaattcctccctcaaaaataagattcccttgttaatagacaattcctttattttcttagaaaagtagtagatgactataattttaaatgtgtatttgaacaaatccttagctacataaagataagcaaagatatgacaggcaatttaattttatatgaagaaaaacttattatatcagacttacctatcattctaaatcagtacttttgtatctataatcagacaacatttaatgaactgaaaattctgcctgtgagaaactagtcataataaaattagacttggtttgctctttcatggagaacatattccagatgtttaagtgattcaaagaaaacccacaatataatggctttcttcaatgttttctcacttactgcttccaaactagaaaaaaaacctaatgcaatcctgatatcacttaaatagcacctcgtattgctcagcgttaactgtgctttttgacattttaggtgtagtgtttaataatttaaacacaaatttatgtgtgtcatattaaaagctctaatctgtgaaatatagccaaaccaatgtcacatctatttaaatagcaaagtacctgtgttcaccctttacagggtgaaggtcttgtgactctgtgtttaggcggccatacttcttgttatgtatgctgctgggcactgagagcccacagtggtgagccatccttgggtggtaaaagctgctaccaaaacctaaatcaaatgccaaagtgaagactgacatgagcattctcctgcctccttttcctttttatctttcctaccatctgttatctcctttcttccaccttcatgcgttgagtgccctcatgatgatttctagctgactgaagtcctttagtctgctcaaccccatctagagacttccccaaagtgaacctttgcccccagttatctgtttatcaactgacctcacaccagtcaaagcttccattgtcaaatattttaacagaaatttaggaattcagattaaactgaatatttggcattttttcttttttttttttttttttttttggagacagagtcttgctgggtcacccaggctggagtgagtgcagtggtgccatcttggctcactgcaacctccacctcccaggttcaagcgcttctcatgcctcagccccctgagtagctggtactacaggcatgtgccaccacgcccgaataatttttgtatctttagtagagacagggtttcaccatgttggccagtctggtctcgaactgctgacctcaagtgatccacccatccacccacctcagcctcccaaagtgctgggattacagtcttgagccaccccacctggtctgggttgttttcttcatctttagcagttgtcttgttcacaactacttcaacaatatttattttctttttctttttgaagcaactctccagagtatttggcctggtttttatagaaataataacttttttcttttctttttaaactaatatttttatgatttaggaaatctttctttattaaattacataatcacaacagttactggcaaagataggtttgagaacatacacacaactgacggttgtaacaagtcaactgatgggagcagaaggtccacacatactgacaggcacctcgaacattttattgaggctgtgagaggttcccatcactgctgtttcacaaagagaatgaagactttggctaatttggtgagtcttaagtggagattagttcagagaacttccactatcattgcttgaaagaagcaaaaaaaaaaaaaaaaaaaaaaaaaatcccaagatcttatggtaaagtttaaagaagaaaagtaaattttaaaaagaaaaaaaaagaggaaaagggagagcattgcaattaattatgagtaccaaaacttatttttgaatccccttcatcctccaaaacattgaagcaggattaatatgtgtgctcaggaatttgggagagaaaatgaaaatcaaaatattctaataagagacatttgaaaatgtacattgtgtcacctaaagggaactgaaatctagctatggcttaacgaggtaggataatcaacttaatggcttgagagtcttgcttgtaaagagagatgattagcacaaaggactcacctgtatcactgaaagatgctgcctgctggcttgccctctctgcagaggttcctgtttacagtttcccctcacatgatatttatttgtggctactagaaatgcacgttattatccagaagagaatgatttcattttgtaaccgttgtccttgtccaagtttcccccattgacatttaagaaatctgttttctaacctttctattatgcaaaacaaaattaatatggatcatttccttttagagataagtattcatatatatggatttaaaccacctttctccatgggcccttattctgatacttttaatccatgtatttattcataaggaaatggaacaatatttactatccacccctataaaactttctgaatttcacactgattccagtgacattccactaacacgaagttgaatacagatgaatacatcacatatgattttttttttgcatgtgtatggtcagaaggggctctcttttgtttgtttttattaatatataattcacatactttaaaattcactctttcaaagtgtacaattcagtggtgtttagtatattcacaagattgtgccaccatcaccattgtttaataccagaacattttcgttatcgtccaaaagaaaccccctgattgcttaacgtaatgtttttaatgaccactttttaaaactttaagttcaacagagtgattatcacaatgttttgtattatctaagaactacacaacagtgttatgctctatacagcaccacggtttactgatgaagtattcaggttgatttgagaggataatgtcgttcttattttgaatgttcatactggctccttttatttggagtgggaggaaatgcaaggcttataaatgaggtcagtgtaaccaatggttttatcaacatagtgaaccagacagagaaataacacctgcccagatcaagcaagtcaaaacaacacgtatagtcaagtggtgctgtccttgtacacagacattacattacacaaactgttctcctaagtgagggaatttgtcccttagaaattgcttattggaacatttggacatcatgcatcatgttaaagatccataaatgccatctcgatagggtagatatgaggcgtggtaatatcctccccatatctgcatagggttcttctgctcaacggattgctatgatgtattgcatcagagactcctgctctagtgcttcaaagacagctgagaagccccacgggagccttctgaagtcattgctacaagggctaaaataccaggagatcaggaagtcattctgaggacttgacaaaataccctactccctaaatgaaactgttatgatgtggttggtgcaaagtatgcatgcaatattttatgactgaatatatctttctattgtaaaaaataaggatccatttctggttgtgacatgagtagaatttagaatccagcagcaatatatttttcttgttactttgccaatccagaatttcttaggggaagcatataacataatagttaagaatatatattctagaggcaggcaaacctgcatataggtatcccaggttcctcaatttttacccatgagagcttggcaaggtttgtttgttttgaaaacaaacctctgcaagtttgttttctcatgtataaaattagaattctccaactactggcctcataggattgttgggtagaaataaaatcagtttatgtatgaatagagctcatcatggcattaggcacctaggaagtgctcaacaaatagtagttatcattattcccccattaacaaatatccattgttataatactaccacaagagactgtcttagtctgttccagctgctataatagaaatgccataaattggatagcttgtgaaacaacaaaaacttatttctcactgttctggaggttgagaagtccaagatcaaaataccagcagatttggtgtctggggaaggcccattcctcatacaaagcaccttctcactgcaccctcacatgctgaaaggagctagctagctctctgaggtctcttttataagggcgctaatcccaaaaatcacctccctaaaggccccatctcctaataccattgccttaggtgttttgatttcgtttcctttttattttttaggatttcaacataggaatttgaggggggacacaaacattcaaaccgtagcatagagcaaacattactggcactgcaccctaaagagaataagcccaggtatcagttcttcttgttttaaatattctcatcttccaatttgcttttgactattgcacacaggcacttcgaggagaaattgcgcctctgaaagagaacgtgagccacgtcaatgaccttgctcgccagcttaccactttgggcattcagctctcaccgtataacctcagcactctggaagacctgaacaccagatggaagcttctgcaggtaagcacattgtaaacattgttgtcctttgttacagtaaaataatatacagataaaatttgtaaagaacaatgaaagtacttttttcatgtaatgttcatggtaatatttgtgaggataggatattttatattagtttataattcccatctaaacattttcaaattattaatattaattttggaagcaactaagacttagtatatgtcttagtctgtttagtgttgctataaaagaatacttggggctgggtaattcataaagaacaggtgtttatttggctcagttctgcaggctgtacaagaagcatctgcttctggcgagggcgtcaggctgcttccactcatggcagaaggcaaaggggagctggtgtacaaagatcacacggcaagagaggaggagaaaaagagggaggggaggtgccagttctcatgaaaactgctagagcaaaacctcgctcactaccgtgagaatggcaccaaaccattcatgagggattcactcctacaacccagacaccttccactaggcctcaccaccaacacgggggatcagatttcaacacgcgagttagagggaacatccaaactctgtgtagcagtattcttacgataaacagaaaataatgctgaatcatgatggaagatgtgaattgccaccatgcagttcctttgtactcttactgcttggattctcaaaaacatctttccctttagaatcctaatttaaacaagagtcaatagtaagatgtgtccaaaagtcatttaaagaaagagcatcctatcacaaacttacatgtggaagtttttcgtaggtttgcgtaataaatacaggcaatgtaagtgtgctgctcaaggtcacacttactagccatgggacctggagcaaattacttaacctttctgagcctcagtctttcatcaaaaaaaaaaaaatgcgataataaaattctctgcaatatcagtttattattaggatgaataagtcaaaataaatggaaagtgctcgggagcgaacatgccaaatgataaacactctacaaattctagctcttgatgttgttattattattattattacagtacacaggttttggaatccaacatattagctgagtgaccttgaggccacttaatctctgtggttgtccatttactcatctctaacatggttactgtaacatcgaatgagttaattcatgcagagtaatggttgtagtggtggaagaggtgcgtctaccttctcagtgtgaaggacaccatgttataccccaaaaccctaaaattagtttaaccgtagaattagagaatcattttctctcctttccaattttctcctttccaacaggatgcagaaggtatgcctctgaggaaactgggtttaaaactatttggttttaactttttaataagaaaaatataataaaccaaatcactttcctattgtcagtccatttaggggtgtgattgagaggcctgttaaagaattgctagatctttaataaagataagttgcaaatcccagacctcttgagatctcacataatttaattcttgttgtgatggatagtcctgaaagatttgtattctagattgttataagtggcatcgactaaagcaaggcgatatagctaagtgattatatgcctttctctgtttgctccatagtagttgagtactattaaaattttatctgttccatccttagtatgtttttcatcttaagtataaataaggaaagtaataaatgtccaaagaaaaccaatggccacattagtcccatataagtgttctagaagtatattttataatttcttttagagagcagaatgccacgtttgctttcagaacgtggtaaaagatttgtgacagtggcaggtagatttccaaatgaggtcaaaggattatgactagtaagaaaagtttttttttttttaatcaatgctaagtgatccattctagttgcactatttatttgcatttaaggtatcaaaaacagtaaatagcttactatgtagccattctttacaatgagtaaaaacttggttataagtacaggaaaacacatgtaaggagatagtatgatatagcgaaaagagcattggattgactattaggaggtctaacttcaaacttaagctcagccattatttgaccgtgttattgtgagaaagccatttaacctctctcagctttaattctcctcatttttaaaatgcagaaatctattttgtctaaggtcacatacagttcaatcttatgattctgtctctagatatctgggggagatacacatttgacagaatttagtttaaaaccaatgaagttcctttctttattcataatacaaatgtggtttgttgaaattatatttctccttgtataactctaacttttaatctcttcttccctaaacccacatatacacagccttctcctattaaacagttcagtttgtggtgtctgctctatattgtagcaaatttcatgtttctatttttgaacatgaccttaaagatatgcttaaaaagtgtttttagcagaaagctgataaatccaaggttttggtttgcatataaccgagtcaagttagttccattcttttctttgatagtaattctgctacattataaatgtgaggccttgttcagaaagagaagaaagcaagaaatgaggttcacatcaagcaatttttttcccattactggaaaagcaattcatacatcctgttgagaatattttatatttagaacaatgtatgtgaggctaacgcattatccaagttctatggcgggaagcttgagcccaccaccattatgacatcatatttttttaaatagtaaatgtcaaaaaagacatatttctatgaaaataaagaatttagtcacaatgctatgtcaatctttaaatcgtgataaaaaccaagtacaagttcatctttgcctctgtccactaagacaaagaacaatcaaaaagtaaagaactctctgggcatggtggctcacgcctgtaatcccagcactttgggaggccgaggcaggcggatcacttgaggtcaggagtttgacaccagcctgaccagcatggtgaaacctcatctctactaaaaatacaaaacttacctgggtgtggtggtgcgtgcctgtaatcctagctactctggaggctgaggcaggagaattgcttgaaaccaggaggcagaggttgcagtgagctgagatcgtgccactgcactccagcctgggcgacagagccagactcggtctcaaaaataaaataaaataaaataaaaatagagaactggagtagtagaaaggcagatgtaaacctgagaaaagaagaagagtcttaaatttgggcaaaatagtataatagaaagattagagttacatactatcaggccgtgtctacttgatatcagaatatcctgggttctttgcattatccattcatttaattttcaaggaaagccatgctagttttttagctgtctgtaatatcagtcaaaatggtgaaaccagttaagggatgtgagcaccaacaatacagtcaaacccagtcacaatttacctatgtatagaatcataatgtatagagaattccaaactgactttgaatcttctaatagaaatgtaagagacattggtttgcctgtttgaaattttctgtgggaatgaagtcctattttcttcctcaaagtagacacattggtatgcatgttactatttgaccatttgactttttgtggtgtaggaaaccatcactccttgcagttagaaaaagtcctcatgtgcattctctcatctaagaatcacaaccttgtgattttgtattatgattatgattacctattatcattattcccttttacgtgtaaggaaaccgaggcttagaaacatgaagtaccacagtcacagtcacataacttgtatcagtcaagatctgagtcaggtttttcgaactgctattcccatgctctttttgtctcctcttctcaaaatcctattacgtttggacttaacaaagcaataatggctgggtgtggtggctcacgcctgtaatcccagtactttgggagggtgaggcgggtggatcacttgagatcaggagttcaagaccggcctggccaacacatagtgaaaccccatcactactaaaaatacaaaaattagctgggtgtggtggcgcacgcttgtagatcagctacttgggaagctgaggcaggagaatcgcttgaacccgggaggcggatgttgcagtaagctgagatcatgccactgcactccagcctgggcaacagagcaagacaccatttccaaaaaaaaaaaaaaaaagcaatactttaaaactattttggacaatacaggtgtaaaatacttcacttttttacatgtatcttcttttttgaaatgattcttaggtatattaacttttaaatcttccttttataaaccaatggattaatgaacccagttcagtgtaccccttagaaatcacacttgtttcaaatataaaattttaaagcattatattcctcattgcctttagaactcagcaattgtactaaaatcagccaaaagtgatttcagtgaatcagctcttaaagccaaactaatgctaatatttgaccaagtagaaacgaatatctaaaccaggtgagaaaaaagttaaaatgatgataaacctttctaattttgaaatagtacacacactgagtaatgcagtcaatctctttattcaccaagcgcaagtagtatataaaggaatattataccatttttctttactcatgagtaaacccacaaatagcacaaaagctgcaaaaacactttaacataaggagtatttgttttattgactgtaggaactcatggaatgcaaacacctttaaaatctgaataatatgaaggcatttccagctattagattctttacatatgtcaaagaacagtatcataaattatgtatgttttttaaaggtttcctaagcttcttccaaagtcatgtagacatcattacactccatctgtatacctctgtggtaacttgctgtcgcagggatctagagcctcatcttttgcaaacttcattccttctttcatccctttgttctttcattcagtcagcactgattgagcatctactgtgtacctagaagacattgtaatgatcctgtttggtccaaggacatactaaacaaaactccctttactgcttatgctatattaagtaaagctttaaagatgggttctcttttattacttccatgatggcccacccctctcatcctttctcagtgttaaaaaccagaaatatacatacttacatactatcataacactgatactacaaaagcagtacccattattatctctggtttacaaattattcaataatttcttactggaaacttggtctatatagtcatagtagtaagctttgtgagaggatgtgatgggatcatagttagctaaacaataggagtatttgtgtggcttcattttaaaaaaactaaccagtttttttccaacaagcaattcttatatcagaaccatttatattctttactttggtgagataggattttctaagcaggtcttttatctgtatctatgtatgtttgttcttaccatcattgagcacaggatttgatcctttaaatgtgttgacagattttgaacattttcctcatatctttcttttttgttttttaatgatcctgtactaatcattttgcattatggggtcacttctggacagagagcctagccatctgctcttacaaataatgtcggcctatcactaactggggataaggagaagacatctaccgatgtctttctagcatgtccttcttgactttttctttctttaagaagactaaaatgattcagcttgtggttctaccacagaactcaggagaaaatgataaatatgaggccattctccaaataaatatgttttcctacattagtggttctcaaattttaacaagcatcaaattcacctggaaggcttattaaaacacagataactgggctccacataccaagtttcaaatgattcagtgggtctggtgtggagcttgagaatctgcatctctaacaaactttcaagtgaggctaatgctgctgaatcatggaccacactttgataacccctgttctatgttaagtacttgtcaggtacagacaaatttaaaagttaaaaaaatatatatatgacttctgtaagacactgtgaagggtttagactctggggaaattaagtataatgccatcccaaaaactctgtgttggaggagtgttcaagtgctgcaggatcatggagaaccaagcacttaacttttctatgaggcagaaagaggaagataaagggaaacgtggaggatgaagggaaactgttaatagatccccagaaacacaatttgctgctatatggatttatatttactgtatttcaaatcacatggtctagaactgtgctgtccaatatgatagctacatatggccattgagcccttcaatgtagccagtcgaaagtgagatgtgtagtaagcgtaatatatacacatgtaatatgtatatgttatatatatgatatagatgtaatatgtatgttatatatatgatatatatgtaatatgtatatgttatatatatatatatatatcaggatgcaaagacttagtaccaaaaaaagaatgtaaaatatctcattatttttatattgattacatgttgaaatgatagtatttttatgtatttgcttgggtaaaatgtcataatgaatttcactcatttattatgattattcaaacttggttatttttcttgaaaatgaatgaagtgagcctgttgcttcggctacaacaatgggcagtgtttctgcaaaatttttacatgtgcctactagaacatttaaaattgtacatgtagcactcattatatttctgttggatagcattggcctaaaagttttcaaaatctagcatggataagaatcacctgcaaagcttgttaaaccaatccgcccccagaaatttagtatcgggtgaggcctgcaattctgcatttctatcatgctcccaggagatgctgtctatttgtaaccacatatagaaattcattcccaaactacagatgatagagttttacagagaggtgcaaaaatatatttttgcatcaagcattgtctgtagcttgaatacaaaattatgttgcccatataccactggtttttgtaagtaaagcagttgtgttacaaagcatacaagtttttatcagctaatagccttttctcaattagcagatactaagtagtacttttattatgtggcaattctccagtttttggaatgttattgagaaatacacagggttaaaacaaattagaaagcacctctcccaaaatactgcagtaagatgtaggaaaaactgctctaacatattctaaactataggttgctcttatgtaaatatttcaactataatatctagtctgatgtgcccactggccagagttttgtaaaagctaaaagtaaaggaaataaaaaaaagaaagaagtatgtgtttgtttttgaaaaggttaggtcacagaaggatttgttgatattaggaatagaatgacccgtgaaaaaaggacaattaagttccaggaaaacatcttttcagtaaggagagaataatcatttatgcttaacctcaactctgttaggaaaaaaaggatgtaaacaaaaccctttaaagaattgaagaaggagagtataaatttaaatgcccaggttagtgaccacccttagagcatactgaggtcaaagcgtactgtcaagcttaagaacatttggttttcaatgtttgtacaactaattgtactttagtcaagaggactgttatcgaaattgctcaggtagccttgaaactaatatggcccaaatattccagagtctgtctttctcaccctaggagaagaatggtctggttttcaagggaattctctattttttttttttgaaggcatcaggatgtgtgaaactacagggggataaatgaacgatgtacagaatgtgatgaaaaaattatatgaagtataaaatgggaatgaagccatcaggagccaaagaaatatttatgaatttaagagaatgaaaagcatattattattttcagatattttataaagtgaacccaaatcattataaagtattaattaggctacttgattgcttgatctttatatactaatttctaatttgttttaatcgggaactatttttgctagttctaaggctagctattatggtaatccatgtaagtgtgtttattattgtttttaaaaatggaatgtgttcctagtaaatgtgtttaaatagcaaaatgtatttatgcatgcatgtatttattttagtttcctgagacctctagttccttactagaaacatgtatataattccaggcatttaaaattgccatgatggtcatgttttcttgtccttttcccttattctgcaactgacatttgcccttgtctccaatttctcactgctttattctttgttcttgtaagtgttcttgtctctctgggctgacctctctccttccctggagtttgaccccgccccaccctttcttctgcatttgtttgcactggttgttttcttcattgcctttcccactgccccgctgcgctgcatgtgaaacactccgccagtagctgctcacagttcccatgctacatcatacccagcattcaaagagctgctgttctcacatggccgccagtaagattcccgactcctccttcacagcacattcctctagaaagtagaaagaatcccctttcaggccacatgagaagctgcgtgttaaagccaactccataaaggggaatggaaactagcgtatgaaattcagaaatgctacttttaaaggtaaataccacaaagtgaatttcaaattcatacagtttatcataatacttctttatttttataaatgctataatgtccttaatataatgatcactgtgatataagttgtcctctcccttaatatattaattaatttactaaaggagacgggagggtggaaatataataaattagaagatgattcttatatcagaagtacagcctttatacatagttttactttattcagacaatcaatgtagtcatatggtataaatttgaaaataattttagtgagcattacgcttactgagattaatagtgagaacttacctagcacttactgtatgccattcacaattataagcacttttgcatgtgctaatgcttttaagcctcacgtaacccagtgagggaggtacaattttaacctcattttacaggttagaaaaatgaggagcccaagggttaagtgacttgcctgtggtcatatatcaggtaagtgagagagccaggatttgaacccagacagtctgcctggggaatctgtcagaactcctaactatgcagtaccactcctctgataaaaagttgaattgacatgacaacatttcctattcatttatgattcgaccctttaaacaaaaagaacagcatcattctcacatttattaatttgtcaggaatcacctggatcatgagttgaggaaatttaaagtaggagggttgtatgaatttcagaccacgatctcaagaattgcctgtttaactcagagcctgaatcattcacagactaaaaactagaatcactcttctgtaggaccaagagggttgaatcatcaaagtcttgctgaagtgaacggaaatcctcctttgttcaatcattcattcaataattatttttttctggtgtctactctttaccaaactctgtttgagatgatagggattcagtcatagacagaccttctctgccctcatggaggttatggtttcttgggatgacagacagtaattttttaaatctcataaaataattacaaatgtgtcaggaaagaaaatacaggacactaccagaatatatagtaaggacctaaatgtgtgtgtgtgtgtgtgtgtgtgtgtgtgtgtgtgtgtgtgtgtgtgtgtgtgtgcgcgcgcgctgcagtaagggtgagaggcaggaaagggcaatcaggacaccctcccaataaaagtgacctttgaccgagatctgaaggatgaagacaagctgagtgactcttctattcatctatatcttttgttttaaatggcctgaagcctgggactaactaaacagggttgtaaaattccagtatgtaaattgaataactagggatcatttgaagtaatggactgcagagttaatgtataattaagtcacatctagggaagatttcccatcattatcacagagagcatcctgtttgctttcttcacagcacttacgaaaatctatagctatgtgtttggtggcttgtttaatgaaagtctgtttcccctatctgaatgtgagctccataaggacagaggccctgaataccacatctactgacatttggcagtgtctttcatatagtaagcattctataaatgtcttgaatagatgaatgcataaaactaagttaaaatgttactgaaaactataaaaataagcagaaagttataccagaggagaaaaattaggggaaaaaaactataatttctgaagacgtagtacttacatctaaatttgtggcttcataaggttaaccaacacttaaatagttttgccaaaactccaagaaaaaaatgaccgggtgtcgtggctcacgcctgtgatcccagcactttgggaggtcgaggtgggtggatcacctgaggttaggagttcgagaccagcctggccaacatggtgaaaccctatctctactaaaaatacaaaaaaattagccgggcatggtggcagacacctgtaatcccagttactcggaaggctgaggcaggagaaccacttgaacataggaggcggaggttgcagtgagccgagatcatgccactgcactccagcctgggcaacagagcaagactctgtctcaaaaaaaaaaaaaagaaagaaagaaaaaaaagaactaccatttgacccagcacttccattacttggtatgtacccaaagaaatataaatttttctaccaaaaagacgtgcgctcatatgttcattgcagcactattcacaatagcaaagacataaagtcaacctaggtgcccatcaatggtggattggataaagaaaacgtggcatatatgcaccatggaatactacacagctatgaaaaagaaggaaatcatgtcctctgtagcaacatggttggaactggaggtcattatcctaagcgaattaaagcagaaacagaaaaccaaataatgcatgtgctcacttataagcaggagctaacctttgggtacacatggatgtaaagttgggaacaacaggcactagtgacaagggcaggagggtgtgggacaagggctgaaaaaactacctatcgagtactatactcactacctgggtgacaggttcaactgtactccaaacctcagtgtcacacaatatacccatgtaataaacctgcacatgtaccccttgagtctaaaataaaaattgaaatctaaaaatataaaatatcaaatcataaaaataaataagaaaacaattgaatctactgatatgtttcattgcttttaaaatatccactttgaattactgaatattttaatatttttagttttacacttcagcacagaaagtccagaaatccaacccttgagtttacaaagacaccacatgatagttcatagttcacacagctagttagttgtggaactagaacccaaaatttgctctctatgtctctcacataccttttccctttattctaataaaggcatttgtcagtctaaatgtacaatattcgaagacattttttaaaggaactacttatccaaatcccacctgtcttacaaggtccatgtgaagcaatgagataaggtctgtgaaactgcttccgaaactatcaaatgttataaaaatgttaagttttattattagaactgcagttcatctctatgaaacctttctaaactttctcacttttctgaacttgactacgcagcgtcttttctaatctatttgttctccctttataagaagaatttaatcctttccgccctgctgggttgtaagaaaaaggactctcttcttttctataatctattgatatttgattatattacacatctaatgggttcccaataaatacatagtgaatagaattgaaccaaatttctttctagacatgtgaaaaaaaatcctgatctttaaatagaaagggtactttcaaagattatatatagaacctcttggtattttgtatttgcaatgaaaatattttaatttgggccaggtgcggtggctcacacctgtggtcccagcactctgggaggccgaggtgagcagatcatgaggtcaggcgttcgagaccagcctgaccaacatggtaaaaccccgtctcaatcaaaaatacaaaaattagccaggcatggtgacgcatgcctgtaatcccaactactcaggaggctgaggcaggagaatcacttgaacccgggaggtggaggttgcagtgagctgagatcatgccactgcactccagcctgggtagagagggagactccatctaaaaaagaaagaaagagagagagagaaagaaaagaaaagaaagaaaatattttaatttgtcttatgttcaacagttgcatcatatctgcatccttttgttaaaattgaacaggcttctagtttcatataataatttctggccaggcgcagtggctcacgcctgtaatcccagcactttgggaggccgaggcgggtggatcacctgaggtccggagttcgagaccagcctgaccaacatggagaaaccccatctctactaaaaatacaaaattagctgggcgtggtggcacatgcctgtaatctcagctactcgggaggctgaggcaggagaatggcttgaacccaggaggcggaggttgctgtgagccaagatcacgccattgcactccagccggggcaacaagagcgaaactccgtctcaaaataataataatcataatcatcatcatcataataataatttctaccaacagctggcaggaaaaaaatatgagagcatagtcatgaacttcagattccactccccttacttttggcattccattcctctgaattatagcttatatttctttattatctcagtttgatttagtctttctaaatattcacctctgtttccatccataaatatcgactgaactaccttttaatatactatctttttgtaacagagaaaatcaagtgtaggtggattattgtaagtgacactgaggaaatataaaaagaccttgacttgtccaggcgcggtggctcacgcctgtaatcccaccactttgggaggccgaggcgggtgaattacgagatcaggagatcaagaccatcctgaccaaatggtgaaatcctgtctctactgaaatacaaaacattagccgggcatggtggcaggcgcctgtagtcccagctacttgggaggctgaggctggagaatggcatgaacctgggaggcggagcttgcagtgagctgagatcatgccactgcactccagactggtgacagagtgagactccctctcaaaaaaaaaaaaaaaaaaaaaaaaaaaagaccttaacttgcttcaaacaagtcaggacccccaattccaattcttaggtctggcattcccatcagacacttaaactgtaggggcagtaaagttgcccatgtggctacagcttttgtggctgtgctgtacttgggaattttaatgttaccctctttgaattaggtccttcattgatcatgcatctcaaagtatctcagtgccacataaaaattttctttcagagtcatattttcccattatgaatgctacctactgcttatctgttgagtgtacacttttaaaccttctgtgggtggtggcccctttgccactgggtgagttagatgctgatcctggtcattatcgctgcctttccagccttttctgctcttacaccaagcacaagaattctctgctgatagtcaggatctagggctgggaaaatgggatgagttgtcctgttagacaggcccaaaaggagtattgtttaatccccagggtgtggggaagaaagatactcttgttttcttttccccaaatgtgtccatatacacccttctcctttgctggcagccaccaggcttgttgaggatctaccctcctctgcatatcatgtgcatcaagggaagccccaacccaagggaatacataatgatagtcctgagctatttcatggtgctctcgcagtcttgattgccctcttcggaattggacatggtcatattacgcaattttaggtaataaaatacaaagggcattcagctaagggaccttctgagaaaggtttttctcgtctagagaactaaacaggcatccttctccgggcactatgcgtagttctttattctacctggaacattctttctccagaaatctttgtgactaactctgtcatttccttcaagtcttattcaaatctcaacttaaaaaaaaaaaaaaccttcttaaaatttgaccacactaattagacagcaactgccccatctccctcttcccagccatctgaatccatttcccacttacctttttatgatagctcttctaggaaggcactccctcctccctgtgaatcatgtctccaggcaattgttccttgtgtagaggaacacaccaaatctgggctgctcctgtacaacaaactgaaggaggtagaattgattctgcaagaagttcaaagctaaataagaaggagtcttgtagcttctgtcttggtcttctggaatgctcactctggggaaagtgatctgccctgtactaagtctactctaaggccactgtgctgtctacatgaagaagccacaaatctaagctagccacatggggaagctgcatggaaagacaaatacgtggctagcccccagctgttggccgaagatccgcagccatcccaagtgaggagccagatgtacaagtgaaaaaactgtaacagccattccaatggagccttcagatcaattcagctttggctactatctgactgcaaacacatgaaagaacccaagcaagaaacacccacctgagcacagtcaactcacagaaccatgagcaatactgataaatggttatttttagccagtaagttctagggtgatatatagcaaaaggaacatctgtcctgttttttctggtttttcctatcatacactcattctgcaggattaacatgtgtaatatactttttttttttttttgagatggagtctcaatctgtcgcccaggctggagtgcagtggcatgatctcagctcactgcaacctccgcctgctgggttcaagtaattctcctgcctcagcctcccgagtagctgggactacaggcatccaccaccacgcccagctagtttttttttatttttagtagagacggggtttcaccatgctggccaggctggtctcgaactcctgacctcgtgatctgcccgccttggcctcccaagtgctgggattacaggcatgagccaccactcccggcctaatatacttttttaaattgtctttcactatgagaaggtgagctccatgaggccagggatattgtctgttttgttagctaatgtatccaaattacctaagaatagatcttagcgtggtaaatatttgttgaatgaacgagtgaatagatcagaatttcagtagctacgttgtgagtatgtggacagttcaccaagaatggcagaatggaaggatgggaggaacctggaataatgtcattgtgcttctggattacccagtcctggagcagctttgcctctgtgggccttgactagtcaagacattttgtgttgggtttttatgttaattccatttgcatcactataaaggaatacctgaggctgggtaatttataaggaaaagagatttcattggctcatggttctgcaggctgtacaggaagtgtggtgacagcctctgcttctggtgagggcttcagcaagcttacaatcatggtggaaggtgaaaggagaaccagcgtgtcacatggtgagagatggagtgagggggtgggaggtgccacactcttttaaacagtcagatcccacatgaactcactctgagtgagaactcacttattactgcaagaatggcactgagccattcgtgagggatccagccccatgatccagtctcccccaccgggccccacatccaacactggggattacatttcagcatgagatttgaagggaacaaacatccaacccatatcagttttctacaacctgcagcagaaagcatctcatctggcacatggtcttgcaaataattctgacttagatgcatgggactcagatatgactgaaccagaagataaatctaagtagcagacaccacagtattctcaaaaccactctttctctttctcttgttgaccgaggcttttctactgagcaaagcacctggtttataatatgttctttcattacgccttctcctaagagacctccttagtgtccctgcaatggatgtctggggagccaccaatctcttagagatgactagacatgtagccccagaaatggttacaccttgagcttttctctcagtgcagatgagatacattgcccatcccaccaatttgccacatttatctaaatttctgtgttaagctgggacctctaccactcaagctgggatgcccctcaccaccaccacactgcaaaaactaaacatttttcattagcctcctacttgcaattaagtacataaaacctgcaaaacaagtaataaaattaaggcactatttggttaatgccttttctcagaaatcacttttgcatgaagttcagttcagtattttatcagtgactacattagtctcgagaccctctacccaataggagggacaaagatgtacatgacacaggctcccttcaaagatgattaatacatgaactacatacagtattacaagggctccactagagatgtgagccccccagaaatgatattaatgtgcagaagagttagcaataaattttgcacaaggggtgacatttgagcttagactcgagcaatgagtagggttccaagaggtaaagaaaaaaatggaatggttttctaggaagaaaaccaggtctgggaagatctgatataacctgaggtagtttataagtctggaatgactgagttatcgggtatatggtggggaaggcagcagaggtgaaataagtaatatctaagcaaatgaaaaacatgtaattaggggagatgaaatataattaaattatttaccttaattcctcttttgactctttacatttgtcattcataaggaaacaatttcactaagattgttttgacctttttaccttatttggccaagtaaacaagggacagaaagtttttaatgtaaaatattcattcaacctgaaagaacattgatgattccagaccatttaaagttaaatattttagagttctcaattatttctatttggatgagtagaaccttttttcagacttcaggaatatatgtttagtttttaacagactaattgttcctgctttcatgccagcctcatgggcatcagcaggttcaaggttagtaggtaggaatctgccccctaagaatgcagcctaagagttaaggaatgcatgattacccctgtaattacttgagaggggctctgaaattctggcagggttggtgaggccaccagataacactgatcaagaatgtacacgaggttaggaattcagactgtagctgaagtggggagttcgggtaaacaggctctgaatggaaaagatcaggaattcaaatagacagttaagtcaagaaaccaacatcttagaaatgtaaacctcactttaagtcaaaggctctccaagctaagacttcataatatatttgccaaggcaagagctagtatctgcttacctgagtggtcctggagctgcggccagttgaaacaggagattgcagatggaatgtcagttagaatactttcagaggccagtaacagatacctgactttaaagttcttaagtttgtctttcccaaggttttctggtcataagaatcaccaggggcacttgattaaattattaattcacaagccccttcactggagattctgatgcaatagacttgggaatatatttttttttaacacgaactccagtggaatcaggcaagaagtgaaaaccctatcgttaataatagacacattagaaataatagagacatttgataatctagcacagttcccaaactttagtatgcatcagaatcccctgggggcttgttaaactacaggctggcaggctgctcccagcgtttctgatgcagtaggtccagcgtggagtccgagattctacatttctagtaggttgccaagttatgctgctactcctgtggtcaggaactgcactttgagaaccactaatcaaaataaactgaagtccaaagaccatcagacctagagctggttaattcaacagattagctatatcaagacttgaggtcagcttctctgggattctcttgtctttttcctcatggtcccaagatggcttcccactgcgccaagcaacatatccgcagacaacaataaccaaggcaagaaggaataaggttcaaggataactgtattgtgtgcgtgtgtgtgtgtgtgtactcatgcctgtgtgtctgtgtttggaaaagcaaacgtttcccagaagctccccaacaaatttcttcttatgtgtcaactagaactggatctcactgaacctctttaagccaatcactggctatgagaaacaagcttactgtgattggcttagaccagattttaattttttcctcagagctgtgtcctttgttgcccaatatctgaacataattgagcttctttaccaaggaacaagaagtaaatagctgttagttaggcaaatagctgggtatgtccacaaatgggttctgaaacaagtgtgattataatgaggttcagaattgaaaatattagtacaaatgctagtaaataatgtatgatattggctttcttatcaccatttgcaacagaataacagtctcatgaagaatttggcacagccattgtagaaaaagtgccttttcagagctcacagtatgcatgtactcatcttgcttttattatacctgtatatggaattgcaagctgtcccttcaggtaatgaaatttagacaagttggaacctgtataacagcaaatcaatactgaaattataggcaaagcctgtacttgtgcagactaacacataggatagaaagactttgtgatcaaaattcaacaaatcccacatttataggtatccaacatagagagaaaactatatatagtggtgtgtctttttatgtgtttgcgtttttctccttattcattcctgaaagtgtattttcttttaacagactcacaactcagctacaccccatatgcccacagtcaacacagtggaaaactgagttgtttatttgagcctcaagtcatccaaatacttcgttaaacgttgtagtaaaaggtctcccctgaattcaaggaggatgccctaagttttctgcatccttttgatagaggaaagtattaactaatgtcagactatctgttgttttattttcctttacagcactagattttgttaaggacattgataattttgaaagagaagctaagctaaggtgacaaatatatcttctgttggtcaatatctaaaattatgtattatttcttttttgactacaccttacagtggttagtttgcactttacgtaaaaaactgatgtctaccatcttccatctttgtaagcaccatccagcctaatagttgttggtttgaataatgccacaagctttgtccagaaaccaaaaacctgatttccaaagactagtctatgtagctgagcccttcattccataatcattaaactatggttaggacacagtatccagtctcccctcaaccttgtccaatcacagtctatgcagagatcatgtaactcgattaaaatctagaaccatagagacatttcccttccctggggcaaatgggaattgcacatgggggaaaatggtgtggataagcaaaaaacggaagtttccaaagtgcaacagaatattgataattttagtacatttcaacatacagtgagtgtaatgacggcattttcctactgcttccttagttgtgaagattttgttttttcttctgggttcactgccgggaaaagagcagaaaatgttttagagcctctgccagcagagggggcatttaccatttgtgcataaggtctctggcactgtgccctggggttctcttttctatatgtttctaacagtcacacacagcagtgtgactgtttacagatactttaccgtcttctctgattgaagcagggactggtttgccagcaacttttggttgtttttgtttttttgaagaccatgcaactaacagatgtttgttgttggctccatatctacattctttgaaagctggagaatcaaattgctgacattcagacaacactaattcccatatccagggagcctaatttgccgtccctgagatcctgattcctggtgttcacgggtttaaaaaccatttcagtgacacaatataagaatgggcttgggagatgcagcgctgtctccactaaagataatcacattttataaacatctgcgtcattactggtatgattcatctctaagctgtatacagctgtgtttccagtttcaattaacaatcccttaattgcatatccatctcatgttactaatttagttaatttattcataattaagagtattctgttttctaccaaggtttgtcgagctcagaacattataaagaaaaatattttaaggcagcatctccgagggattttgtttcttataatcacatcacagtaaaatgtcattcatgcgcccaaaggaagatgaattgctaagggatttttttttccagtaaaataagaagctttgggaagctgcagtgtgttgtgtttttaaaccaagttaaatgcgatgcattttgttcttttctttctccttccctgacatcctctcaaaaaaattatcattttatttgtattattgcttaagtatcacagcaaatccagtcaccagtgcaaataaaactgtcattaccctgtcaggtaatggtgtctcttaaaatctaagctataaagtctgtacattttagaggacattaagatcaagaatttttaaattgcctaagtctaagcaagtggagtacacccttgtggaaaatggaaggcagatgaaaacatgatgccaggcagtgaattcattttagtttgatcttttctacaaaaatacatatatccgtgcagcaagagtcttgcctgtgttagtacatgtgtctgtgtgtcattcaaagcagcaataacaaaaaattaagaccatttctcactttgtttattgttcaagaactcccacctatagccttgacctgtgtttgagcttaaaaaaaaaaaaagtcttataactgcccagtggtttggagattttacacaatagaaataataagccatcttttgcctcacatgaattctactaaaatcaaaactccataggatactttccaaagtaactggtgaaaggaaaagtgtggtagtataggtatgcatattatccccatcactttatttctgagctcttctattttttaaaaattttaatttgtatcttaaaagggcaaaacataagaagaggtaggagtattctaaatttcagtgacaacaaattcatttattttacaatttaaccattgcccgtcaacatttacttaaaatttcagcatgggaggttttaaacacttctagagtcccatcttaccccatttccacgatgcttttcttctccatgtgttgctgcagtttaatattgtctgcgtgttttaatatgttaaacgagttaaacatagagtaggaagttaaaactgttagcagctatatgtttcccaagattgatgaaaattcaggtaacactccaacctgttaaagatacctgcaatctggccaggtgcggtggcccatgcctataatcccagcactttgagaggccaaggcaggcagatcacctgaggccaggagttcgagaccagcttggccaacatggtgaaaccccgtctctactaaaaatacaaaaaacatttagccgggtgtggtggcatgcacccatagtcccagctactcgggaggctgaggtgggagaattgcttgaacccggagcctgggtgacagagtaagactctgtctcaaaaagaaaaagaaaaaaaaaaatatatatatatatatgtgtgtgtgtttatatatatatatatgtgtgtgtatatatacatatatatatgtgtatatatatatgtgtatatatatatatatatgtgtgtgtgtatatatatatatatatatgtgtgtgtgtgtgtatatatatatatagaaagagagagagagagagagagagagagtaagcagggaggggttgaagccagaaaagactagaaattatctaggccaaaccctttaatttatagattaggaaatagtttctggttgacttagctgagacgttctcatttgttaaaagcaagatcagaaatcagacacaattcaacgctcttcactacaccttgtttttctctttgtggaaaacaagacgtatcctgttcaaaaatttatgctgtttatctgaaagcccaaaatgcctgtttacatcatattttccattttgcaatagcagctcattttggggattattttctgatgaaatctctaggtttagttgtacttgaatatctttttatctgtacacactggaatatgcatataataattgatagaaatgtggattttaaaagtagagatgatcattattattttatgatcctttaagttaataaaattcacctagaataaaataaacaagtttaactaaagttctcgcattttcccagaaatcgtagactagaaactagtcttatttgcttattttattccaaagcttattttacctctattattttgtggttctataaaatatttctgtgtattcctccaaagaacctcttggaaaagaaagtaaacatcacatctgaaaaatagctgggcattttttcattatctctgcaaggggaggggacgtgaaaggcaaccccatatagaaactcaactccctgctttttacaatgaatgaagtttttccactgcactgtcagaatggtaattcttgctaactactcacctatttcacaacattaacagagttccaggattcatgctttaatattgcataatggtccatgttttgaacatgaggagtggcagcggagattacactttgattccttggatttcatgtggcactggatgggagcaaggcactgattttaagttgagataaaaaggagaagtcagtcaatgcctgcagccagacaggactcttgtaatagctagggagtatgcctcatttggatatgcatgactgccgggcaaggacactgccatgaatcgctaatggcagcagttgtatgacataagagagatgtgtatcagcaactcacaagttgactttgttacatgttatgaacacattcctgtgggcactcattcatagaagtgagaaatgtggacaccacagtgtcccaggcctttgttaccttatggcctgggaatatcttgctttgctggaacatgaagccacgtctggttataagaagaagtttgatctgggagcaaaattgcctgttcacgcatgtctttctcacttctttaaaactaacttgctataagggtgattaaaaaaaacagatgtcaggtgagagttttgctttgcatcaacttcctacttgtagaggtaataacataaaccttgcctggcaatcattatttgtcatccagctgagggtgtttactcttgagaaagaagtaatggacaaaattgacttggattctggttctatgtttcccattaattgactctggacatatacatgcaatttaatccatcttactaaaaacatgaccaactcacaggatgtaaattctattctatagaaagggctttccctcagtagttagtcaagggacggttcctaactcctgtctttattgagcttattttccaaaataaatgtattattttctactttgttcacagagcaaggcagcataaagaaattaagcaacaaaacaatagtgtatttttacccaactttctagaaaacacccatttttcttaagttttgatatttttttgccaacaggcagtcaaaaagaagataaataaaactgggttaagttggtaatgacacaataaataaatgagatgaagaaagaggcaataaatatgagtggataccaacaagaaacatgttcaagccctgaaaaaataatgagaaaaggtagaactattaataatacatcccgctctcgtatcacaccttgctccccagatacatcctatctgtcctggcaccatgttgatgctgttgttctgtaagctatgccaatgaacatgttggatgacctactccagctctacctcaagatttccaaataagaaaaggacccagggatctccttgctgaggtctttatccatttactcaggtcacaagtactaattaagcagctcttatgtgcaaaatgttattgcttcaggtcagtttttcctatactgctgttctataagagaggaagaaggtccctgccctcagaaagccctagaatacagatctagagatgggttcaacatctttgttatgcaattatttcattccaattgtaatgagtacttagaaaggacaaaagcagagtgctgagagagtataacagagggacttgacctggtgtagtaggcctggaaagtttcctggggaagtggtattttagacaaacaacacacacatacacccatgaatgtatacgtgtggagaatgtattctaagtaactatgatgaatgtatttcttactgtaggtcatggtcaaagtttgaaaactattgttctaactagtattataattccagggatagtagaggtcatgtgacctgtttagcacatgcctgccttaacagtatctagtaggccaggcaatgtggctcacacctgtaatcccagcactttgggaggccaaggcaggtggatcacttgaggccaggagtctgagaccagcctggccaccacggtgaaaccgtgtctctgctaaaaatacaaaaattagccaggtgtggtggtggtgcctgtagtcccatctactggggaggctgaggcaggagaattgcttgaacccgggaggcggaagttgccgtgagctgagatcatgccactgcactccggcctgggccacagagtgagactctctggaaaaaaacaaaaaacaaaaaaaaagaatgtctagtaaataagtcagtgccaagcaactacctgataactgttaccaccttagtcatcaccgaaggcagaaggtcttgcattcattggaggagagttaccaatctaagacatttgcatgaaaatgtgcacagagccctcacctgataatcaaagcatgttccaacacttctctttggataaaataagagttacatctcaatgaaatcacttgtggatcaagttctcatcctttcgtaaataaagagaggggcagcaagaaatggaagtgagcacatataagtgtgggaacctgtactttcctaacctataaagcattggatgtagtttttgctattggtgcgcatggagtcatgtggccttggagcagttaggtaccttccctgatgataggggagaaggcaaagaaattgatgatacatctctctcattgtcattccctagtatattacacttaaatctaactgccctattttgtgattgccttactgctgtggcttgaatatttgtgtctccccaaaattcatatgtggaaacctaattccatatatgatggtattaggaggtaggccccttgggaggtgattagatcatgagggcagagcccacatgaatgagattagaacccttataaaagagacccagagagctgctttgccctttttgccatgagaacacaagaaggtgctatctatgaacaagaaagcaggccttcaccaaacactgaatctgccagcgccttgatatcagacttcctagccttcagaattgtgagaaaaaaactttggttgtctataagccacccagtttatgatattttgttatagcattccaacggactaaaacattcattttccagaaaatctactccatttataagccagcattcttttttttttttttttaattttctacagatctctgcagaaacatgcagagtaataatagggccaggcacggtggctcacgcctgtaatcccagcactttgggaggccacagtgggtggatcacctgaggtcaggagttcgagaccagcctggccaacatggtggaaccccgtctctactaaaaatacaaaaaattagccgggcatggtggtgggtacctataatcctagctactcaggaggctgaggcaggagaatcacttgaactcaggaggcagaggttgcagtgagccaagatcccaccattgcactctagcctggacaagaatagtgaaactgtctccaaaaaaaaaaaaaagaagtgataatatatttgctgtatatattagttatagatagttatattgcagtactatcagaagctatgccacatattatttacgtatttcttaagatatagaaaacatccctcccctgcagtcattagtacttttgcattcaaacttcaaatgaaacaggactttagaaattataggcttggtgccatcctggccaacatggtgaaactcgtctctactaaaaatacaaaaattagctgggcgtggtggtgcacacccgtagtcccagctactcgggaggctgaggcaggagaatcacttgaacctgggaggaggaggttgcagtgagccgagatcgcgccactgcactccagcctggcgacagagcgagactccgtctcaaaaaaaaaagaaaaaaaagaaaaaaagaaaagaaaaaagaaattataggcttggtgatttctcaggcattaactcaagaaagcagcctttataccgattacctacattcacccagcacttaccccattaatttctaatgttgcttggaacaaatgaacattcctggaatgcaagctaaatgaaagagccccgaagaagaacagggcatttcctggttcctcatattgacaaatttaaaagcctgtgctataatatgggctcctgtttcctttcaagtttgtctttgaataagtggacagagtagctgaaagcagagtatttaaagctttgaaacgaccactttatttcagtctctgttcttgctgggaccactcttataaatgaggagattagaaaatcacctagaactatttaatcgttgtgcagaagaccctcttaccccaaatatttacttaccgctcattttattggcacactgcctcaaattccacctgctgtgaactgacctaagtgaatttaggtcacgtgcaactattaggttctttttgggaaataatggagaaccacagatgtgtttgaggtggatgaggaatggctacctcaagccgcagcttcatgcttcatgctgaagtcctccacaagtgcaatcatgtcgttaaccaacatttgttagaaggcaggcagaagtcagcttacagcctgttctacaatttttatgaagtgtaggattttaggcttaaattgacaccattgcaaatacagtattctcttacctttagatttggcatcaggtcacaagaattcttcctaagccaatggttggatacaaggccattggagaccagacgtaaaattaaaagcccaagcaacaggttttgctggattcttatatcctgtttatgcaatgttaggggatgtcattaaaatattttagttaatccatgtatcttgattgtcttaaattttactaatgagatcctatagggatattcattgcaatccactatttccctcagcaaaaacacatttgcgatatctattacatgcattacaaaatcctccaaggttcacagagatatatagtagtagcagtctctgggttttggcctttttcataagatgaaggctgtgctgtcctagaatatgaattcctaattaaaataaccatttgcctcaagcctctagagttgaaggttgcactaactgcacatataaaatatccaactatctatgttgagatatttaaaattaattacagatattgtaacaccattatttaacttaaattccattacaggtcctttgagtatgcaaaatatttctttgagatgtggtaacccctttaactgatcaggaaataaacctttattatcaagttgttatcccaccttgacaggcctaaagcgcagaccacatatcagaatcccctgggcagcttataaagctcctcatgcccaggctgcatctcagaccaattcaatctctgggggtgggctccaagcatcagcatttgttgaaaatccccaggattacaaagtgcggtgaagtttgcaaacccttgtaataagagaatgggaggagggatggctgtttgccaagcagaaccaggaatgaggaaggatattggtaaacaaaatttatccataattgacttttcatgaatcacagtcctactgagacccagccttgtctcatgagactttggctacgatgatgagtgagaaaaggactcctcctaatttaccagactcttgattagaagcaaatgaaattttggaaaagagacaagtcactttcaaaagaccccagcctgtacctgaccctacctctggactccatagtaatggcaggtagtggtcattcctggagtaactctgtatttcttaaaggaacatttgcataatgaacctacagcaatctggaagacgactggggtaaatagagaatttgttgattttagatggctgaatactatccgtgcagagcaattaaaaggacaactgtcagaatcaagtaagagaaaggaaataagagaagtctcatgttagtagaccttgtttgatcaatgtgttttcatcttgtatatgattaataaaataagtttgggagttaggatcaacctttgtttactcactggagaataacttgcatatagaatgaagctgggattgtccaggctggtttttttccatttggaagtttggatacaatacaaggaagcctgaattccaaactgtttctcttaaagagtgcctttctgagccgctattaaggaatgcttattgtttcgaaaatggtagcacagaagtgttataactagagtacaccttgtgcctgcaattaattacccagtgtcttcaaaaattcttgtcttttgctggtagaaaacctttgaaactatagttgtctgtggtattcactgcagcaccttagatataaagagagaaatttattttcagaggaatcttgagacagtttgtgtgtgtgtgtgcatgcctgcttacacatctattggttttccccaaggattgtagaaatcccattaaaattccagcttcttaaggagctactgaaactccagtttttcatattttcttttataatatttggatgcgtttaggtaaacttgcagcattttaattatgtctgtatcagatgagcggaagaaatgtaaaagggtttggggagagatttaattttagatagcggcgtaattaatagcatttggaaaaactagtggaactttaattaaatgtctctacattaatttagtcatttaattgaacatgtagtgggatagtccttacaatttttcacccttactctttgaggaaaaatgatttttgaataacaaagcatcagtatgactactttttattatttagctgtatgttcactacttggcactttgtttaatttttccccccatatgtttcgagctttttaaaacattaatttggcttgtcgcttttatcttaaaaactataaatctgggggccgggtgcagtggctcatgcctgtaatcccagcactttgggaggccgaggtgggtagatcatttgatgtcaggagttcaagaccagcctgaccaacatgacgaaaccctgtctctactgaatacaaaaaaaactagccgggtgtggtggtgcatgcctgtaatcccagctacttgggaggctgaggcaggagaattgctggaacccagggggctaaggttgcagtgagcagatattgcaccactgcactccagcctgggcaacagagtgaaactccatctcaaaaaataataataaaataaagaaataaagaaaactataaatctgggagaaaccgtatttggaaacattgagcaactgtttcttttcctttattttagactttaatattcactagagtcatgttgtaaagttttcaccttaatattgtaggctttttttttttttttactttgccaacttaactggcttttttaaagtggtgttatgctgcagcagtgtatctgaatttcagcagtgccttttacgtggctgctcacaatcttattaaactacatgaattatacatggagagaaatataatttggtaaatttggtgatgtttcaataaccatgcccaaggaggaatgttgtgttaaactgtcaatttgagaagtgttttgtggtgctaaccacagagtgaattcagttctacttcatttcacaaccctccataaatagtgccccctaaaagtggtgcctccttgcctgtactttgacccagatttttgtcatttttctagataagcatatacattgtgcacttattaatttttcaaatgacacaaaggtgagaatgggagtcaacacactgaaagatcaaaatcaagactcaaaataagattataacagactgggatactgtaccaaaataaaaaaattaaaataaaatttaacaagaacaagcaagatgtcctgcctttaagatttttaaagtcttttgtacaaatataggctgaggaacatctgactttgtggcgctttatatgaaaaacaaattgggattttaaataaccacaaggactgtattaatctccagtatgatctggtgtggcttactgtacgaggcaatacagtattagattgcattaatgaaattcacaaatgttccattaatctcttcactagttaaaccacatctgcagtcatattgacttatgagcatcacgtatgatgagaacactgaaaaatcataatacattgacagcagggcaaccaagattgtgaaaggtatagcgatggttatatgacaaatatttgaaagaatctagaatgttcagtaagaagataacatgaaaatacaggacagcttcttcatgcatctggggagggtgggtaaaggacacagcacacttaattaagtaagattgtagaagagaactatgggcaagtgttacagtggagcttactctgagtaaggaaaatgtaaacgttagagttgttattaagtggcatgggctgcttcacaaatttccatcattttttaatctgattcatctgctaataggacaaactgtaacaatagcttaaacaatagagaaatgtaggtctctctcatgtacaagcccagaactaggtagatcaggcctccttccgctattctgcttcactaagtccgaagtcctcctttaccttgtcctgccatggtggcctcaattctcgttgtcaccacatggtccaatatgtctgcttcagctccagccaacacatctgagttccagcccccagcaacatggaagaaggaaggaggcacagagagggcgtgtgccagcagtgttgtgagaaaatctttcagaaactgtcatgaaatgtatcccctgatagttccttcaccagaactttgtcccatgattatatttacatctatgtgaggctaagaaatatattctttccttcaggcatctacatacccaactgaaaattatgagttctattgccacaagaaaaaatggaaaatatatggggacaatcaacagtacttgcacaaagatgttttacagagaattactcttttacctgggaattttacaagataaactttaagatcctatcaactctctctctctctttttttttttttttttttttgagacaagagtctcgctctgtcacccaggctggaatgtagtggtgcgatctcggctcactgtaacctccacctcccgggttcaagtgattcttctgcctcagcctcccgagtagctgggactgcaggcgcccgccaccatgcctggctaatttttgtatttttagtagagacggggtttcaccgtgttggccaggctggtctcgaactcctgacctcaggtgactcgcccgcctcgacctccctaagtgctgggattgggattacaggcatgagccaccacgcccagccagatcatctctggaggcagggggatcacttgaggtcaggagtttgaggccagtccggccaacatgacgaaaccctgtctctactaaaagtacaaaaattagctgggtgtggtggcaggcaactgtagtcccagctactcgggaggctgaggcaggagaatagcttgaacccaggaggccaaggttacagtgagccgagatcgtgccactgcactccagcctgggtgacagtgagactctaactcaaaaaacaaacaaaaagagtctatgatcctataatttatagacaacatacaacctcctttctctacaaagagaattggttctcaagggctgtttggaaattcatttccttttaagtccaaaatgacatacaaaagtgaccaatatatacaatgtacacccttctacaataagttctcttttgttgccgtagtaatcgcatgtcttttcttaaaggaacacttttttgactcttttgtacttttgaacatagcggtgttaataataatatttataaaacattatgaaaatatgcacacaaaacacaacacaggctaagaaaacctaatggtggcctaaagtaagttctgatgtcctctgttggtggtattcttcattgccatgcttctgctgtgcctgggacctttattgctacctatgggaagttgtaagtagagaagtttctttactacagggatgtgaacaatcattgtaagtaaggaataatgaattcacataagttcacagagcatgtttttctgccctggtaatactgcatttctcactttgcatttaaagtacctacgcccttacacagaaaaagttatcggggttgggtgcagtggctcacgcctgtaatcccaacactttgggaggccgaagcagggggatcacttgaggtcaggagttcgagaccagcctgggcaacatggtgacaccctgtctctactgaaaaaaaaaaaaaaaaaaaaaaacacacacacagaaaaattagccaggtatggcggtacatgcctgtagtcccagctacttgggaggctgatgtggaagaatcgcttgaacctgagaggtggaggttgcagtgagccgagatcgcaccacttcactccagcctgagtgacagagtgagattccatctcataaatatataaatatatatatataattatcgattgattaatattattatatggtccccattactctaaactctcaaaatgtaatgtaggtcaaaatcagaaaaaggccatactgtctactccttcctctgtttcattccaactataagagaaagggagagggcaaaacaaagatgacaggaggccaaattgtacatagaattcatggaaattcttacccaacatgtaaaattatgatagtataaggaaaagtatactgcaaaaattaaacttctacattgtgaaatggagaacatttttacatctagctctattgcttctccctgtggagctgttctaagcacaaagttcccattacataatgaacaactccttaaatactgtgcaactatttctcactagaagcacgatgcagcaaactctgtttctcagtaaccatttatatcatacctagtggtaccgagttctataataaaagggtgatatgtgcatattttgtggtcatagagtgcaaagttgacatctacagtttaaagcattgcattgcatgaataaggtcaaaatttaaatacttttctatgatcatgttctttacattaaaggttaaagatgcatgccgctttaaaaatggtttaagggccggacacggtgactcacgtctataatcctggcactttgggaggctgaggtgggcagatcacccgaggtcagacgttcaagaccagcctggccaacatggcaaaaccctgtctctactaaaaaatacaaaaattagtcaggcatggtggcgggcgcctgtaatcccagctactcgggaggctgaggcaggacaatctctggaacccggaaggcagaggttgcagtgagcagagatcgtgtcactgccctccagcctgggcgatagagcaagactctatctatctcaaaaaaataaatgaataaaataaaataaaaatggtttaagaacttcaaaccatctggcaccagaaaacacctaaattgaattaaaaatctggaaatttaatttcacaacttgtcctttttcaagcctaccctaagttttgtttacttaatggggagaatctgttttatttgttcctatgtagaagactgctgattttatcatgattgtattagggcccaaggatatttaaaatatttcagtagctattacttatactttatatctgcattgcactttagagttgactgagcattttcaaagtattatcttaccaaattgccacaatagtcttgagaggctagtaaatcatgggagaagcccccatttccccactggaaagcagagaaaacccccattgtagtaaaggaggggttccctccagagctcttgtggttgtgttgaggaggaagtattaatgctgctgggcatgacttacaagaaataagtcaattcacttaagcaaaagtgctatgatcctgtataccatgtgagcagctctaggatggggtcacccagcattttggagcagacattagaacatctggagggagtaaacgcaaagaaaatgggctagatacctttccttggatgggaaaggataacattaagataccaagatcaaatgttcaaagagcacatatacaccagagaatactatgcagccataaaaaatgatgaattcatgtcctttgtagggacatggatgaagctggaaaccatcattctcagcaaactatcacaaggaccaaaaaccaaacaccccatgttctcactcataggtgggaattgaacaatgagaacacatggacaaaggaaggggaacatcacacaccggggaatgttttggggttgggggagtggggagggatagcattaggagatatacgtaacgctaaatgatgagttaatgggtgcagcacaccagcatggcacatgtatacatatgtaacaaacctgcacgttgtgcacatgtaccctaaaactttaagtataataataataaaattttttgtaaaagcattgtataataaaagtagtaagataaaccagtaaaaacaaaacaaaacaaaacaaaacaaaaaaaagttcaaagaggccgggtgcagtggctcacgcctgtaatcccagcactttgggaggccgaggcaggcggatcacttgaagtcaggacttcgagaccagcctggccaacacggtgaaacctcgtttccactaaaaatacaaaaattagctggatatgatggtgcgtacctgtaatcccagctacactgaggcatgagaatcacttaaacctgggaggcagaggttgcagtgagctgagattgcaccactgcactctaatgtgggcaacaaagcaagactctgtctcaaattaaaaaaaaaaaaagtttaaagaaaaataagttatttctccatgcttcaggagatatgtttcgcaggagaaagaggcttaatagagaaaacagatccctacaaacatttgtggtttttaaaactgccccattggttactaagtggataacatgagcgtgatgccagattcagtactctagtgagccatgcagctttgctgtgctctgcacctgatgagtgtggcctcacttcttataaatgcctgtcattgctaacaggggtccttgctgaaacaacagggctggactaatgctctagttcccttcctggaaaacctatcccaaagctgagatcctcatgatgccttctctcatatatgaatgattgcaggttacgctatcatcattaaatcgaaacattttagaccactttgcgtttgtttgtttgtttgtctcattatgtccagttttatcctgtttcataatttaataaatttttattgggtctgtcttctggttaaatgttgtgtgtataaaaaataaagtcaagagagagaacaggagttatggaactaatgacaaatccatccttcagctaaataaaattatactatggatgatttgagctgtacgttgagtgataatttttaaaaataagatagatcgggtgcggtggctcatgcctaaaatcccagcactttgagaggccgaggcggatggatcacgaggtcaggagttcgagaccatcctggctaacatggtgaaaccccatctctacttaaaaaaaaaaaaatacaaaaaattagccaggcgtggtggtgggtgcctgtagtcccagctactcgggaggctgaggcaggagaatggcgtgaacccgggaggtgaagctcgcagtgagccaagattgcaccactgcactccagcctgggcaacagagccagactctgtctcaaaaaaaaaaagaaaaaaaaaaagggccaagcatgctggctcacacctgtaatcccagcactttgagaggccgaggtgggtggatcacctgaggtcaggaattcgagaccagcctggccaacatagtgaaaccctgtctctactaaaaatacaaaaaattagctggacgtggtgacaggcacctgtaatcacagctactacggaggctgaggcaggagaattgcttgaacccaggaggcagaggttgcagtgagccgagattgtgccattgcactccagcctgggcaacaagaacgaaactctgtctcaaataaaatgaaataaaataataataaaaaataagataaagtatcacaagtaagatgtagttgaaacttcatgcatttttctatgatgcctatgatattcaaaagataactgaatttcatgagcagagttcaagaacttctgagtatacttttcattgatgacttaatgtaatggatttctatgatgatggcactatattcttttggtgtttatggtattaataaaaaattgtggtaaagcttgtggaaatgaacatgccttggattagggtgccttaaatgtgcctttgtaaatgcagctaggagactccaagtcacccttctagtctaactgctactcctttcttttacaaactacatgccaactaaactgaccttgatctgtttatgaaaaggcggtataggaacaggggctctgcaattggacagatccaattctaatcaatccactccattgatagatatataaccttgagtccttcctgtgcctcagtttcctcatctgtaaaatggaattaaaaaccaacttcgtgaggcttttggagaatgaaaatgacataactcaaagattattgggtatcagaaacaataatgttatctatcactgtctttactgttattattattattgtcattattattattttctctacctggaacaccaattccacaaactcttaatgtcaagaccatgctgtatcatggagccttccctgattcctccatatgaaaataattaattctcatattaataatattacttttctagttgtattttctttttttagcttttattttaggtttgacggtacatgtgaaggtttgttacataggtaaacacatgtcatggaggtttgttgtacacattattttatcacccagatattaagcccagtactcaatagttatcttttctgcctactcgtattttcattatccccaagtatactatacatatcttaaaattaggatccatgttgaaaaaacattgatatttcctatggcttctaacacagtacattgcacttagatattcagcaactctgtattgaatgtatgggtacaatctgctcttagtttctaatttggtattaatatgttcaagcctcaagagctcatgtaaatgatggtttgactatattgcccatcttttgttaagttgaaaagctgaaattcatgcactgtttgttagtgtagtaatttgtgacaacgtctagctattaagtcttttctaggtataaaacctttatatctgtcattgttcccctcttgtgtttttgctttaatatcgttgaaagcatctattattggaactttcacttctgaatagtacttttgagaacctgtatagaatttcagaggccttagaaaattgtcatagattgcttttagtatatggtttaccactgtggtctcttaacttttcaaaaagtatttccaaagggcacttacatccataagtggaaattgatttacatctattattgctgattgttcactattctgaacttcggctaaacaggtgatttaggcagaatttttttaaatattagattttttcctactttctaaatattttgtagctctttcttattaatttgagtcaacttatgctcgcttttttttgtcaattatagatggttgtcaggggtttggcaaatgtcatatgaaggtaattctttaaaagttgggatttttgaactgtttatttctactacttttgattttgctggaaattatcattctattaaagggacaaaagggtgctcagaaatatgcattgaaaaatttcttacagatttatcaaccattgccctcaggcactgatattcagccagtatgttccaatacatccatgtctttccattttaaaccttttaattctgttctaatttttcattgcctgtgcctgattgttctgtatccatctgatacgaatggttaagtacaacattttaaatatcactcttgcctatacatattatttttcttgtcagatgatataattgtagtcattacatgtttcttaagcacaactgaaatcttaatttaaatcaataagtcttgtttctgtggccattgtttcccagaactctccggatttctaagcatggtggttattcttccaggaatagtgccgagagtcttcagcagcatgcatttctctctaattgacattatttcacactctccattttccttactattgaaaactgtatttcattggtattttgccaaggatcctgctctgtttcataataatgttctgttcgcactctctgcactgacaaatacctattccatgcatcaattgcataaatggcaatttgaaagcatttaaccacagctggatatttttcattgattcttttcatctgaagatcattcattaggcttctccctcctgtttcttctcacatccatacctcctttcctcctatgtacatagtgtcttttgcattttctgtatttaagtgtaaattgctgactacagttatgcttttacctcattccatggtcataatgaaatcacaaatttaaaaatgtactactttttaaacctgttttctgacttgtccatctaaatgcaattttataattcttcgacattcagcctcctggtgaatgatttctgcaatctctccaagacatctgtgcagtgttatggattatattgattgcattttgtccatgttcaaatttgcagaatgtaacctacagaatatatattgactaataaagaaatgcatccacatggtggatggttgtaaagagaaaatatatattggtgtgcagcaggcgcccacacaaatgaaatctagaaaacagcagcttgccatgtcagagttgcaaatgaaggctgtggctacaaaacacagaaagtctggagtgtatgaaaggtttttcttccaaattcattcacacataaaaatgaaaaaattgaaaaatcatatatgtgcaccttaatttttatatcgcattggtgtttgggcatacgaccctgagattttcataccctcgatttttttaatataaccacctgagcgtttcttcccatggggttactttagaagatggggggtgtacacactacgtatgtatgtcaataaagaaatgaaggaataaaggaggaaagaagtgaagaaggctgggggtaggaagggagggagaaattcagtgattcattacttattcatcatcctaaactggcatataaaataatatgtttaaatcagtctaaaattttcattgtataatctctgaaataactagtccccactccctaaactgtttggtgtaaatatttatctatgtctaatcatttctatgcaaaatagccttatatatattttcattttcataagatcatctaagaatcaaaggaaaagctattttaggcaatgaacataggcagtgatttcaaaatagaatttgagaaatgcaaggatagatggaatcacaaaagatgatctcattcatggtgttttaaaccctacaaatagatttctgtttagttgacctcatttcaatagcttctcatttttttcagaagtgtatttgatgtgtatatttctaataaacttatttttctttttgtacccagtattaaggagcacagcatttatatccactgaacaaaggataactgaaaggaaactccttgatatccaacttggagtatttgtttctcgaatgaatatgagtttatataagtagtttttttcacatacataaaattagaatttgtttgtattattgatattatttcagaacagcggatttaacgtcatagatgatctagatgtgtcctttccttagaaatctttaaaatgaatcacatagtctagaaacagatccagatactacatgctctcatcagaaaggactttcttctcttcgtgtcaagttcagtgttggcaccgtatagacaaagcgtgttaaaatagcagggttcttgttctctgacacattacaagagaggcaagattataaaactgctatgtgtctcattataattcccattagtttcatttgcttcaaaacattcacttctgtgctttttgcaaaagctttcaaacttattttttgatgattctaaaagtaattcttctatgtcttttcctagtgatactagcattagttttcttttccaattgtactaggaggcatgagagattatcgatgccctattttcttgtctaaataggcaacccaaataatcatagtgacctgttcatttatattatctttatttcttgcctcatacttcttcatatttcttcatttcccatgtttccttattctttggagccagaaacgatcacgttaatcactctttccattagttttctcctatacattttctgatctttctctgagccagttaagagtcattcagccatttgataatggacactagtttactttgaccttgcaaacacaaataccctgtttgatctttatttgctgagagcagtaagacagaagaattacaataaactttttagcacccttctgttcaattctttttcagaaatcgttccctcaaaaagcctattctaggctctttcttttggcagtttcctagaattttcctttgcttttcaccaactggaacattatcactagaagtaaactaagggaccatctaattcaacaccctcgttttgtactttaggatactgaagccaagagaagctaatttttttgcctgccataacacaactagttagtgaagcagccaaaactataagggatcttgccaccataagctttatcggcccatccgtttatctcctcaaagcagccctatacctgatttccttatttctgttctctaagtaagccaagctcagaccttagagtgaccttcccctaatccaccctgcctgacatccaataaactgacaaatccagttgattatgaagctacagtgtttttcaaaccataccataattgtctaggctgttgccatgctctacacaccagttttcttattccagtccctccctgccccagtcccagttcactctactcagcctctctactgcaatggataaaatcacagtttccagattcacaaagctcacagctctgccactttctagccttgtatttgtgtttcagttgctgctgaaactctctaagcctattttccatctataaaatggaaaccaacccagaggctcgttgtattacagagatattgcatgaaaagcatttagcgcagtgtctggcccataagaagtcctcagtaaatagtagtcttggggaagcagtagggtgttgtagtaagagagcagagcaggggacagcaaactacaggtctcagtacaaattcaacatggggcctgggttttttttaatagcaggggagctaaaaacagtttacttgttttaataagttgtacgaaacccaaagaagaatatgtaacggagatttatgtgttcctcaaagccagaaatatttactttctggccctttacagagaactttcattaattcctgttgacagctgtcagggtatgaatcctctctaccacttagaaactgtgtaaccttgggcaaatgttttaacctctccaaggtttggtttccctgactgtgaatagtacctatgttacagggttgttatgagaattaaatgagatcatttatatcaggtgcttagctcactagctgaaataggatttaataaatgttagctgacatggttacgtctactcattgttgcagataaatagcctctaagtgcagctttaatagtgattgtttcttaaaatttttgaacaaagtttttctatttcttatccaattaaataaatattccacattctggcattcaatatttctaacgacatcaagcaactctaaaatcattgaatgttttaaagcaacaggaaaccttagaaataactcatctaaactcatatcatagatatggaaactaagggccaataaaaccaaggcttctaggacctgaaatcagatcctctctttttaggtagtgtgatcttcatcgtgcttctgccatgcaatctcagaatttaaagggatttaagaatcattcattttcttcctaaggcaggattcgaccctataaaatccctgtcagtttggtcattcaaacccagtttgagtacagtcattgatgataaatcacccttttcccagggagcagttctggttgtttcaaagtctttataataaatgaaaattggctttcctgaaatctctatatattgatctattcctgcccactggagccaaagagaaacgtcacttctctacatctgtaaaatactcgttgtcaattttcgtatcttctctaagcatcctcgtttcaagctgatgtgaactagttgggtttttgattgttttcattgtcctgctaagtcgaaaagctaagaaaagcttggctctttcatcactgttatatatcccactgtgtaacagaacttgagttcagggtatacactctaaataactgcttttgtaaaagtattcaattatattgatttttttcgttccctctgttgttcctcataattaccctcagtcaagactttcatcttcgtctttatcttcctctgcaagaattaacagtggtcccttttgtgaacttcaaatatctgagactggtctcagttaatttaggaagtttattttgccaaggttgagaatatgcacccatgaaacagcctcaggaggttctaacgacatgtgcccaaggtgtttggggcacagcttggttttatatatatttagggagacatgagacatcaaccaatatatgtaagatgtacatttgttccatccagaagggtgggacaacttgaagcaaggaggggcttccaggtcacaggtaggtgagagataaatggttgcattcttttgagtatctgattcgcctttccaaaggaggcaatcagataagcatctatctcagtgagcagagggatgactttgaatagaatgggagacaggtttgccctaagcagttcccagcttgacttttccctttagtttggtgattttgaggccccaagatttattttcctttcacactttcaatataagctatccagaactgatgataatattccagatatggcccaaccaatggaaatgattgtgtttcctacataccatatcacaatcaaacctgttttgcaccttgcatttactttctttattaatgatgtcattgcaatttagaaaatttggggccacatttacttcttcctctctattatcttcagtttttatttggtcactaaattctgtttgctgactcttatatctaaaaataaaaacactcaaatccagctattcctctctaactactctgcccttccctcagtcctttctcagtgactattaatgatttggccttctaatgattagcctccctgtccccagacttttatccatctttatcactatggctagttatcttgctaaacaacagatctaatcctagtaccccattatattaaaaaaatcttctatagctacagctttctctccctccaggtcagtatccatagcctgtcaagatgtggctttgataaaggacagaaggcagggaaattctgggcagaagagggcaggtccccattgaggacccaccctcaagccaaaaagcctggaaccatggcccaaagtgagaacttacatccctgttttccctcttgaagggtgccttttccaaaaccatccattaccccccacccaccccccaacctgtgcctataaaaaccccagagctcagctggcagaaggaggagaagcagatggatgtcagaaactacagttggacatcaaagagaagcggcttgactttagagggacagtttgacagcatagctttggagaggagtccagctgtggatggtcagactccaggggaagattaccttcccactccatccccttttcagctccccttcccactgagagccactttcattggcaataaaatcccccatatttaccatcttcaatttgttcatgtgacctcattcctcctggatgctggacaagaacttgggtgccatgcgtgtgggtgaaaaaggctgtcacactgaccctccactgagctgttaacacttaagccatctgtgaatggcaaagctaaaagggcgctgtaacacttcctcatgggcaccctcccctagaggctgctgcagggcccgtacggtgttcactcttgccagcactcaaaaatgctggccccagctgctgcacctgctcacctgtgctcccccttccatgaggggtggaccagcgagtgagtggagtttgctcccctccagttcccacccacgaagggatcagggaaatatcctccttcagctccagtgaggcacagtggtatacacctatagtcccaactactgaagaggctgaggtgggaggatctcttgaacccagaagtttgaggctgtaggcactgtggttgtacctgtgaatagccactgccctccagccttggcaacatagcaagatctcatctctaaaaaagaaaaaatatatatgatgtggctccaattcactgatctagcctcttaactgaattccttcctcctggctgggcacagtggcttatgcctgtaatcctagcactttgagaggccaagacaggagaattgcttgagcccaggagttcaagaccagcctgggaaacatagtgagacttcatatctacaacacattttttcaaaaagaattttttcctccctgctccccaccctacccccttgcaaccttatttactcttcggcctctggccctctcgctatgtctttctcagcttcatgcctttgaaaatactctttctatgcctggaaagcccttataaacctggaaattcctattcttattcaactctgagccagtccattttagtggcttagttcagaggctctagatttaaattgcaattctgtcagattctgtctgctttgccaacctcaatcaagttatgtactatgcctcagtttcctcatcagtagaatgaaaataatacagtagtgcttttttcatagggttgtagtgaggattaaatgagatgaagcgtataatcctcatgtacataacacagtacatactatatgtgttgcacatagtaagtgctcagttctttttctttgcattattcttagcacataagtcaagttacatttgctctcccttacgcaaggtcaattgttcttttttatgtgtttacccgttactttgttcatgcatttgttataaccactgccatcataaagcaacttgctatctttgttcataaaacaaatcccagattcactgagctcaaagtgagagaaggaaactttgcattatgtgcagttcctatgcttttctccaaatttcacatctccgttggggatctctcactagttatccttgccatacccccacaccagccttacaattttgcattatgtttcctacatcatgattctaaacggtcctcctgttcgctttctctccatcccatatcgttgcagatagctatttcctctttttaagacagaaacacatttgcattttgcctaagctacatttgtaaattttacagtattttcgaaagacacaatggaatctaggaaagatgcaacagataaagagattaactggccaatttttgagagcaccatccgtaaagtccacgaacaagtgaggcttccttgtcggagaaagcaattcagtcaccataaatgatcattcaagcctgatctcattccctcttgaaactggaaattgaaagcttgttcctctgacagttgtgttgtcagtggatatgcccagtgtgcaaaggactggacaaagggcaaaagtacacatatcccatctggaattctgagtcatccctgagacatcattttggatttgtctactgagatgaaattaaaacatgagtaatcaagcccacacttcttccccctcaaactcatctctttggtatcatcaagaaaatcaaatgctaatagccattgacctcctaattctagtgctcttagctatgataaaacagtcattaacttaatctaaatgttgcaaataaaggagccccatcaaagctgaagccccaaaattatacaaatgagttaactgggaaggcatgggggaaacaacagttttcataagacacactctaaatctagtttattctcttaggaagacttttctcatcaatagagagccacataaagatgccttacctgcctttcacggggactatatcaattggctgtactgtcactcactccaaaactctcaaaatgcctaacacagattcttgattttattgattgcattagatgttacgttttctaaattttcagcaccctggaggtcacctcaggaaatcatgcagtttttgaatgattttccttagaaatacacgtgtagctatacatatgcccatgcgttatttaatcagttagtgaaaggaggaaaacagcatttctattattgacctttctcaatctctgaggagactgtatgtcttgcctacagtccaggattgaaagcaaaagaaaaaggcactgacaaaatagcattttattttaatagcacattatggagagacaaaaaaaaaaaaaaaaaaaaaaaaaccctgggatttcctttgtctaagtagaattgacgtatgggtgagatcagtctctattttactcagtacaagtgcacacatatttatgtacacacatataattgtcatctttgggccgggcgcggtggctcacgcctgtaatcccagcactttgggaggccgaggcgggcggatcacgaggtcaggagatggagaccatcctggctaacacggtgaaaccccgtctctactaaaaatacaaaaaattagccgggcgtggttgcgggcgcctgtagtcccagctactcaggaggctgaggcaggagaatggcgtgaacccgggaggcggagcttgcagtgagccgagatcgcgccactgcactccagcctgggccacagagcgagactccgtctcaaaaaaaaaaaaaaaaaattgtcatctttggaagctaagggccctgtatcagagtatcagaatatacctatatccaggatgcaatgttctccagttttgcattaacatcagctacaaggttcactgccatctaagactaatcaacagtaatagctaaaggacaaaggtcagttcctgagagatatgcctaaattcatctggctatatcttctgttcctcccaaaccctaaccccataaattcttcattgtttagaaggattcatattttttgtttgtttttcatattcccattttattggctggggttagaattgcaatggcagcaaaaaacacagaagctatctacagtggcttaaataaatagagttttatttatctccaatattaagatgtctggaaataaggtgctttgggcccaacagtatcaggactggcatctgtatattttttattgacttttcctcatgcaatatagcagccaccattatttcacagggtgaaaaagagaaggcaaaaagggtgtactatctgagtcttatcatttttataaagccaaaaatttcccagaaaccttttttgaaagacttctacttgtatatcattgtgtagaactgtgtcacatgacagccaccaacaaaaagatggctagggagaagtggttttcaacaggtattgaagtagctaaccggcagtgtctgccggtcttcagttataaacaccagcagctaactctggctaattcaagtcagggaaaacaaaggggatggggtaggggctctttatttaaaagatactcatagaaatgaacgaagtaatttgaaaactaggtctcagaataggacatgaagtataagagttctaaaatctcaaaagcaggaacacatgcatcttctttttaagtgttgtctttgaaatactaagctccaaagtctttccaaccttgtattattttcttcctttgtcagcttcctgagtggcagagtctgagtaacctatggggtctttgaactctttaggggaattgaggaaggcaaaaaggtaccatgattggcagctctactagagtcacaagaaatatggggaaagcgattcctcaaaggaaaaacaaaaacagaaacaacaaccaggcagttagtagaaggatgaaatactggacccacaaagacaacatatgtcttctcaccacacttggtctctctctctctctctctctctcacccttctctctctctcatagtaatgaaactaaagctgcaaaactaaggcctagctattcattgtgatccttatgagatcataaaaaaaatctgtatttaagtggagaaaaataaatggaatatcaactttaaaaaattttttttgagacagagtctcgctccgtggcccagactggagtccaatggcatgatctcagctcactgcaacctctggctcccgggttcaagcaattctcctgcctcagcctcctgagtagctgggactacaggcacgtgccaccacacccagctaatttttgtattttcagtagagacagagtttcaccatgttggccaggctgttccgaaactcctgacctcaggtgatccacccacctcgacctcccaaagtgctgggattacaggcacgagccactgcacccagctggaatatcgatttaattgtaagagaaaaatgcactagtttaaaaatgtgtcctctttatcctcaggttttaaaaatatttttaaggtagtttagaaaaactgaagtgattatttgataaataaatttcaaatgctatcaatggaacaagaatggatattagatatcctgctaacaaggatcatatttttacaagttgtttctccaaagagaacagagctacagctgagattctggtgcgcataaacctttccatcagagctgtagtcacctaacaattcttatatcacaatcttcatatctcaatcccttttccaaataacttcatctttcttaagttgcatacaaatgttataatctaatatttttgagatggatatcatgtgtcataaaaagaaagccattgtaatattaccaataccaagtattagcaaatattgacatagctttagaataaaaataaacagagctcaggttctggctctgccatagctagctagatttatcttaagacttcagtttcctcatatacaaaatgttgatagtatcatcatcttgtaagccttgttgtaaagagcaatttagctaacagtaacagtgtttaacatgcataaagtgaagactcctttctgggctgataagaacgctagtttattcatttgcttatttctatatttttaagcttagagtctgaaaattttcagagtctgggagtcaacgtgtggggtgtgaattggaacttcaccacttactaacaactcccttttgtagtgcttccatttatttatctgttcaataggagtaataatagcactcgctcaaagagttgtctgaggattagatgagacaatgcttgcaaaatgcaaagtggagcacctggtgtatagttggtattcaataatttctagttgttgatatgatgatgacgatgatgatgtattctcttgatatgtgaatgctcatcacaccatcctatggaatatttgattttaagaaaaagttgggtttgttttttttttttgtttttttttttttttgagatggagtctcactctgtcgcccaggccagagtgcagtggcgcaatctcggctcactgcaacctctgtctcctgggtttaagcaattcccctgcctcagcctccagagtagctgggactacaggcgtccgccaccatgcccggctaatttttgtatttttagtggagaccgggtttcaccatatttggccaggctggtctcgaactcctgatcttgtgatccacctgcctcggcctcccaaagtgctgggatgacaggcatgagccaccatgcccagccaagaaaaaatattttaaacaagttaagatcatttactatactgtgccctaagatgaggtgaacatgtagatcatgagatctaattgattttagatgcagttcagttttttaaaagaatgacctgctttccatattaaaatttcaaaacaatgatatgtggagatgatgacagaatatggctgaatgaggtaccttgttatcctcaaccttttggctcagagacctcttccttgctggaaactttcctaaccttttaatgatttattaacattttgcatgcactctttatacctttcattaatgactagttcactgcaaatttttctttgctttatttcctattcttggtgtgacattcattctctatctgtttctatggaagcttttgtgatgcctcagagagaaagaattctgagtctttgaaataatgaaaacattactaaaccataaaacctagatttcaggagcctaatagaggattagagctttattacgtacagccatcttacagtttagccttcaagtctcaattgtggaatgatcttttgtcctttctctccagtgtgcatgtgtgcatacacatatagacacagttcgcgcttcagtcatataaatgggaagccacaaagcttcctagagtacccagatgcagaattagaagacccaatcttgacaccagggtcaggggatctgtggtttggggggacttgtgctggctatattgttgtcacagcaggaacagtttgtgtcggtatagaggctttaacttctagtaaagggatatataatgaaaatgtaagcaaccatcgtttatttttctcacataataggaatttaagagaaagatatacccaaaattggtttattagctcaacagtttcattcagaatccaatgtctttccatctttgcatttgctatccttagcctttggctttggtctttggaattgtcacgcgatggttataaaatggctgccacactccaggaattgcatcatgacagtgtgaatggaaaataaaggaagagtggcagttcttgtcatgtttcagaagcaacagcatgtctccctaacatctctttggccagaactaggtcaagtagctgcatctacctgcaagggaaactaagaaattgactatcagtgctttttaaacttttttttgtgtgtgtggaaatagataatcactagagaaaaaagggagagtggaatggttgttgatgaggcaaccaacagtgtctaccactctatttataaaccttttcttgatttttcctactaaatgtgtggccgttttttttgcttgctttttgttttttgtttttgagatggagcctcactctctcccccaggctggagtgcagtggcgtgatctcggctcactgcaacctccgcctcccaggttcaagcaattctcctgcctcagcctcctgagtagctgggattacaggtgtgtgccaccacgcccagctaatttttgtatttttaggagacatggggtttcaccatgttgatcatgctggtctcgaactccagacctcgtgatccgcccatctcagcctcccaaagtgctgggattacaggtgtgagtcaccgcacccagccaatgtgtagccttttagttcaaggacctttcattataaatcttcatagtccaaacacccggcatattgtctggcacaaaataggaagaaatatttttggacgtgccaaggaatttgcaagacagtgagacaaatagccagtaaaaatgttagcattaatatattattaaaaatagtgagaaatgctccaggcgcagtggctcatgcctgtaatcccagcactttgggaccccgaggcgggcggatcacttgaggtcaggagttcaagaccagcctgaccaacatggtgaaaccctgtctgtacttccagctacttaagaggctgaggccggagaattgctggaacccaagaggcggaggttgcagtgagccgagatcacgtcactgtgctccagcctgggtgatagggcaagactctgtctcaaaaaaataaaaataaaataaaaagaaaaatagtgagaaatgttatgaagacaaagaataggctactttggaagaataatagtgggaacttcttcatagtctaggaaggcctctctgaaaaggatatatttaagctaaaatctgaaggttaggtcagtcatatgaacagggaggggaatggaataatattttcaagacaatgacctaaaaggaggcaagtatggctaggagctaatgactgagggggtgagtggtacaggacaaggctggagagtttattttatgggtaagcagagaaataatataatctgacgtacctgtgaaagtacacctgagctgatgtacctgcaaaacatcatacaatctgatggacctgctgtataaatgagagattgaatgtggcaagagtagaagcaaagaggccaggtaagaggcatttgcagttgtcttgatgaaagaaaatgactactgggagtaagatggcggcaatggaaatagagagaaatgaacagatttgagatgtattttcgagacaaaatctgtatgacttggtgatggattagatgtcaggcatgagggattgaggatgactcccaagttttttttgtttgatcaacttgttgtactgtttgctgaggtgataaagatggaggaggaagcagatttggaaaagatcaacagttcagttttagacatgttcagtttgaaatgtgtgtgatatgtccaagtgcagaagtcaaattcaattatagctcaaaggagagacccgagctagaagcgtaaatgagaaaaatattgatacaaaatggaatttagagcatccagaatggaaatcacttagcatgtaaagagggaagggaagatggcctaggaccaaaccttgataaacttcaagaaaaagaagtcaagcagaggtaggagaagagaagtcagtcaaaaatcaaaagaatatgacatctcagaattcaaggatgtgaataaatgtgtaagtgatggatggctttcggtctgggctttttgttttttttttccattttaagttccaactttgctacaatccggctacgaatcccacaccctcccaaattatctgaggatgttaattgatacttgatcagaaagcagtgatttttaaaatcatatacttctaaattatctgagatatgaagcaatgagatagggaagtggctgaaatatgtttctctggctcagctgtcatgagggcttgctctagaatggcactcaagcacatgtttatccactgagctctatatcatttattccattagctgaagaaggaatctctcacactctaacttcagttctgttggacatgggaataaaagttagatgtatacagactaaactaaacagatggtagaaaaacaaaggattcttaaagtatattggagaaatgcatttctatggtcaattttcttgaatatcctaagatcaggtttcatgtatataattctttacatttcacaaagcacctttagatgtgtctattccatttaaccctcatcctaactgtgtgaagtagggcacagaagtgtagaaatgattttttaaaactcactaagctaatcaatggataatctgtgattataatagaatctgagtttcggcatctttatcttattccttactgcactatatctggaatggtaaatattgttcatctcacaagcaagctcttattgactgatatcagctgcctagagtggtttattgtaaaagagcataaagcaaattggggaagactacaatacagtgccataggctgattagtaatttctaccattggtattaaatgagaaaataatggtacaagtgctttacatttgtctgccattcctaaactaaggcacctcctgttatttataaggaagaatattctgagaagtttaaaagtctcttgttaaatcatttgatgacgttggataaaatggcttaaaataagaatatgcctgttgcacaaataatctacactcccccaagataatgaataagtcagctggagcatctcaagtttcaatatgtagaggatcaaaatgaaatagtcataaaaccccttgcagacatttcttgggcaggcaaactaatttcctagtaaaagaagttggaagttggacaaattgtatatgggaactttctatactacttttgcaaattttctgtaagtttaacttttcctaataggatgctgagattcagctcttccaatggtctcaaatgttttttggttttgttttgttttgttttttgagacggagtctcactctgtcacccaggctggagtgcagtggcgtgatcttggctcactgcaacctccacctcacgggttcaagcaattctcctgcctcagcctcccaagcagctgggattacaagtgcctgccaccatgcctggctaatttttgtatttttagtagagacgggattttgccatgttggtcaggctggtctcaaactcctgacctcaggtgatccgcccaccttggcctcctaaagtgctgggattacaggcatgagccaccgctcctggcctcatttaaccattttgactttcactttttctgtcttcaaaatgaggtattgagctaggtaaacttaatgtcttttttcgctttaattatctaataattctgtgattctcaacttggtgtgttaaaccagattacacctaagaaaccctgaagactttttagctaggagtttaaatattcacttagtcattcaattaatatctattgtgggtctgttatatgccaggcgccattttaggtattgataataaagcagcaaacaagacaaaacccctgccctcaggagagcttacattcttgtaaagaagacagatgataggccgggcgtggtggctcactcctgtaatctcagcactttgggaggccaaggcgggtggatcacgaggtcaggagatcgagaccgtcctggctaacatggtgaaactccgtctctactaaaaatacaaaaaaaaaattagccgggcttggtggtgggcacctgtagtcccagctactcgggaggctgaggcaggagaatggcatgaacctgggagctggagattgcagtgagccgagatcgtgccactgcactccagcctgggtgactgagcaagattccatctcaaaaaaaaaaaaaaccgaaaaacaaagaagaaagatgataaacaagtacacaattatcatataacaattttaaatagtgacagcatgttgaaataaataaagcaaggaagacgctagagagttgttcatggaaggaattgtcattttatataaggtgatcagggaaggttccactgaggaggtgacatttgaggaaagacctgaaagaagtggggagggagacccgaaagttcatgaggaattgtgtcccaaacagggcaacacataaaaagtccttgaggcaagactaagctgattatataacatttaaaagaattaggccaggtgtggtggctcacacctgtaatcccagcacttttggaggccaaggcgggtggatcacctgaggtcaggagttcaagaccagcctggccaacatggcaaaaccgcgtctctactaaaaatacaaaacttagccaggcatagtggtgcatgcccatagtcccggctacttgggaggctgaggcaggagagtcacatgaacccaggaggcagaggatgcagtgagccaagattgcaccactgtactccagcctgggtgacagagcgagactctgtctcaaacaaaaaaaaaaagaattaatttacatatcatgagatcatctagtctaacacccttactagacaagttcaaaaaggttaagacttggccaagatgacacagctatttaatgtgatatctgggttagaattcacctcatctgaattcctctcaaattgtgctctttgaggtcaatgtgccttttaaaaaatgacagaaagcatggctgtagatttcagatcataccaaatttgatggaacaatgaccatttttagcttcctatagagtctaagacttgaacttgccaagggagtcacagctggatttgtaagcatcaaatccacaaatgtacttaatgtcaaccaaggattttgtgtcacctgtaatgctcccccaggaagcccccaagtccactagtcctaatcactgtgtttggcttcataacctgttggcccaaacattacgcaaaaaagagcaatattcccaaggtggtcatgttagttgtggtgagatgtcaaccataagtagatctgaccgaggaaatgccttaaggaagcagctcaggaacacctgagtatatgtgtctagaatgaagcctattaaaaaaactactgcagagctaaagacagctgaaagccattatgacagtcacaactacttgatagattgaaaccaaagagttcctttgtgattagatagatcaggactctaaatcatgtttttacttcatgtgttcattcattcatcatacagtcagtgattcagtaaacaatattgagcatccattatgtgccaagcactgtgttaaattctggaaacacagagatggattagacccctgtccccagggagcataaagactagcagagttagacctccctcccatatgaagaaattaaatgaggtaaggcattaaaagtgctatgattacataatacagaacccaaaggggaaggcattttctgaaaaacagaaaactgaaaataccagcttttcagcctcacacagacataggaaaaccaacccccatcaacatcatctcttcttttttttttattattactatagtttaagttctagggtacatgtgcacaacgtgcaggtttgttacatatgtatacatgtgccatgttggtgtgctgcacccattaactcgtcatttacattaggtatatctcctaatgctatccctcctccctcccctcaccccaaaacagtccctggtgtgtgatgttctccttcctgtgtccatgtgttctcattgttcaattcccacttatgagtgagaacatgcaatgtttggttttctgtccttgtgatagtttgctgagaatgatggtttccagcttcatccatgtccctacaaaggatatgaattcatccttttttatggctgcatagtattccatggtgtatatgtgccacattttcttaatccagtctatcattgatggacatttgggttggttccaaatctttgctattgtgaacagtgccgcaataaacatacgtgtgcatgtgtcttcatagcagcatgatttataatcctttgggtatatacccagtaatgggatggctgggtcaaatggtatttctagttctagatccttgaggaattgccacactgtcttccacaatggttgaactagtttacagtcccaccaacagtgtaaaagtgctatttctccacatcctctctggcatctgttgtttcctgacttttgaatgatagccattctaactggtgtgagatggtacctcattgtggttttgatttgcatttctctgaacatcatctcttaatataaaaagcataatgtgctgatttcacattgcatgcctgtatcaaaacatctcatatgctctataaatatatacgcttaatgtgtacctacaaaaattataagaattttttttaaagcaacaataaatatcttcattagtcaaccaaattaaatctattaatatatccatgtttgtgaacaggatggccacagaaccctgtggatgcttaccacttaaacatttcctgaaacaaatatgtttccaaaacatcttgcctgtctaatctgacaactgcagacatcctaactaggctctgaaggtgctctccatagcactgatgttattgattcagttgttaacagcgcaggcataaatgactgatgataactctctaaacgtcccttcctactgccgttgaaatggctctgggctttatccaagcagggctgctaaatgaatagtagatgtaccagcagaggagaaattggtcctgaggtgaattaactctcctgaggtagatttgtttgtgcttccaacaacctgtacgttaaaccttgtgaaccttcatgtaggaattttgaggagaaatgggcaatttttggaaagcctaatgttttatcagccgctttttcttctcattgagacctgtgtattctcaagggactttggaagtttgccattttaagaacagacttgatgagaattatttgaagtcctccacgtttccatttatcagttttcctaatacagacatcctacgcacatcgttgaaagaatgttctttttgcctcacaggtagatcacaaaagtgggcccataatcattgggtagagggtttctcagctctgagttaaattgcagctgggtattgtttttctgtaataggatcttctctgagtgaatggtgaaacatgcccatttttgaggtcatgagagcagagctttccacatcatggacagaaaagggcaaccggccatggtttcagttatacagggagaggaaacaataggttttgtctctgctttgctattgcttcaacagcagcatactgttggacactcagacattagggcacaatttagacttgtttcacagctgtcatttctttcctcaaaaacaacaaacctgcatgggggaaatgagtctacatttcagggtttttcaagaattgataacataacatgtacttcaccatgaatttatattccacaggtccctgttctcttctctggtcatcagagtacaaaatcacaaccaaaaagcaagaattgatatctatgaagctaaagtagtagtagtagtagtagtagtagtagtagtagtagtagtagtagtagtagtgaagcaggatattaccctgatcccctcgcgggcgggaactggactgcatagccgcttcggtgctggcaggggcagactccactggctcagtctcactgagttccacccctcatgggagaggaagcacaggtgagtgggtacaggagccagggtgagtgcttttgggcgccagcaggaacaaaactctgtgtgggccccatggcagtgtctaggagggtgcccgcgacccttgaatccccagaaggagtgttacagggcccttttatctttgccatctgcagatggcttaagtgttaacagctcagtggagggtcagtgtgacagccttctgtactcgcacttgtggcacctcagatcttgcccattttccaggaggaatgaggtcacacaaactaattggagatggtaaatgcgggggattttattgctgatgaaagtggctctcagcaggaaaaggagctgaaaaggggacagagcaggaaggtaatcttcacctcgagtccagctgtccgcaatcagactcctctctgaagctatgctgccaggctgtccctcggaagtcaagccacttctctccaatgcacaaccatagtttccaacatccagctgcttctcctctgtgccggctgagcctgggatttttacaggcacaggatggagggcagggtgggctatgggtggttttggaaaaggcaacatttgagcaggaaaacagggatgtaagttctcactttgggccacagttccaggcttttaggcttaagggtggggcccttgccagagacccgccctcttctgtccagaatttccctgcctcctgtccctatcagtagtaatagtagtagtagtagcagcagcaacagaagtaatactaactactacataccaagcattatctacgtacttcatatctattcaccaacctaattgttacaactttcactcgcgtccgtgtgaagagaccaccaaacagtctttgtgtgagcaataaagctttgtaatcacctgggcgcaggcgagctgagtccgaaaagagtcagcgaagggagataggggtagggccgttctataagatttgggtaggttaaggaaaattacagtcaaaggggggttgtcctctggtgggcaggagtggggatcacaaggtgctcagtgggggagcttttgagccaggaagagccaggagaaggaatttcacaaggtaatgtcatcagttaaggcaaggaccggccattttcacttcttttgtggtggaatgtcatcagttaaggcaggaacaggccatttaaatttcacttcttttgtgatttttcagttacttcaggccatctggatgtatatgtgtaggtcacaggggatatgatggcttagcttgggctcagaggcctgacattcctgtcttcttatattaataagaaaaataaaacaaaatagtgttgaagtgttggggcggcgaaaattttcggggtggtgtggagagataatgggtgatgtttctcagggctgcttcgaggtggatcaggggtggcgtgggaacctagagtgggagggattaagctgaaggaagattttgtggtaaggggtgatattgtggggttgttagaagaaacatttgtcatgtagaattattggtgatggcctggatacggttttgtatgaattgaaaaactaaacggaataagagaaggagaaaaacaggtattaaaggacgaagaattgggaggacctaggacgtctaattagagagtgcctaaggaggttcagcatagccttgccagcaaagattatttactttaagagttaagagtggtggtttggggatagcaccaagagatatcagctgtgatggcttggagaaacagtgtaaaccagcagtgtaaacaagagcagggcatttatgactagttgagactggtgaataggagtatgactagacagaagataggagggatgacaagttttttggggtgcagtctaagttggtctggtgtctggaatgagactggggcctaataaaaaggagcgtccatacaggagcttaaatgggctgtaccttgtagcattctgaggacaggcctgaattctgagaagggcaagtggtaaaagtattgtccagtcctttttaagttggtggctgagcttggtgaggtgtgtttttaaaagaccattagttcactgaatactaagagcctgagaaactgcttgggtgatttgactaataaagtccagtctgttataggaccgtatagaggtgggaaggccaaaccgaggaattatgtttccctgtgggaaaggcctctacctatccagtgaaagtgtctacctagaccaagaggtattttagtttcttgactcggggcatgtttagtaaagccaatttgccagtcctgggcgggggcaaatcctcgaacttgatgtgtggggaagggagggggcctgaataatccctgaggagtagtagaatagcagatggaacactgagaagttatttctttgaggatagatttccacgatggaaaggaaatgagaagttctaagaggcaggctagtggcttgtactatagcatagcctgcctttgctggtgtgtggccattaggcctggtggaactgccatcaataaaccaagtgtgatcagggtgaggaacaggaaagaaggaaatatggggaaatggggttgaatgtctggtggatcagagatacagtcatgggggtcaggcgtggtatcaggaataatgtgggaggccggattgaagtctgggccaggaacaatggtaattgtgggagactcaacaaagagtgagtacagctgaaggagccggggagcagaaagcatatgcgtcaggtgtgaggaagaaaatagattttggaagttatgagaactgtagagagtgagttgagcatagtttgtgattttgagggcctctaaaagtattagggtggtggcggctgccgcacgcagacatgagggctaggcaaaacagtaaggtcaagttgtttggataaaaaggctacaggacgtgatcccagtccttatgtaagaatcctgactgcacagccctgcacttcagcggtgtgtaatgaaaagggttgggatgagtcagggagagctcgggtgggagcagtctctaaagctgtcttcaaggaatggaaagaggagtggggaaaggatttaggatctatggggtcagctaggtttccttttgtgagtttatataatggttttgttaggatggcaaaaccaggtatctaaagtcgaaagtatctaaccatgcctaggaggaaaaaacttgttgttttctagaagggattggggtttgggagattagtcagacatgatcagcagggagagcacgtgtgtttttatgagaattatgccgagataggtaacaggtgaggaagaaatttgggcttgactgaagtaatgggggctgtctgtgaagccttgaggcagtacagcccaggtaatttgctgagcctgatgggtgtcagggtcagtccaagtgaaagtgaagagaggctggggtgaagggtgcaaaggaatagtgaagaaagcatgtttgagatccagaacagaataatgggttgtggagggaggtattgaggacaggagagtatatgggtttggcaccacagggttgataggcaaaacaatttggttgataaggtgcagatcctgaactaacctgtaaaccttgtctgcttttaggacaggtaaaatgggggaattgtaaggggagtttataggctttaaaaggccatgctgtagcaggcgagtgataacagactgtaatccttttaaagcgtgctgtgggatgggatgttggcattgagcggagtaagggtgattaggttttaatgggatggtaaggggtgcatgattggtcgctaaggagggagtagaggtgtcttatgcttgtgggttaaggtggggagatacaaggggagatgtgaaggaggctttgaactgggggaaaaggcggcaatgaggtgtggctctagcctaggaatagtcagggaagcagatcatttagttaaagtgtctcggcctaatagggaactgggcaggtggggataactaaaaaggagtgcttaaaagagtatcgtctaagttggcaccagagtttgggagttttaagaggtttagaagcctggccgtcaatacctacaacagttatggaggtaagggaaacaggcccttgaaaagaaggtaatgtggagtgggtagcctccgtattgattaagaaggggacggacttaccctccactgtgagagttacctgaagatcggcatctgtgatggtctagggggcttctgaggcaatcgggcagcgtcagtcttcagccactaaaccgagaagatctgggaaggagtcagagagccttgggccagagttccaggggctctgggagtggctgccaggtgagttgaacagtccgattttcagtggggtcctccacagatgggacatggcttaggaggaatcccgggctgcgggcattccttggcccagtggccagatttctggcacttgtagcaagctcctgggggaggccattctggaggaacccctcgcagctgcagttcaggcatttggagttcttctgtgctggagatatggctggggtttgtctcacagtggagggaaggaattgcaactcagaaatacattgctacttggctgcctctactttattattgtacaccttgaaggcgaggttaattaagtcttgtggggtttgagggctggaatttaatttttggagtttaatgtcgggagcagattgggtaataaaatatatattgagaataagacggccttttgaccttttagggtctagggctgtaaagcatctcagggttgttgccaaacgagccatgaactgggcttgtttttttatttgatgaaaaagagcctaaacgctatctgatttgggataaagaaaaaggagcattaaccttgactatgcctttagctccagccacctttttaagaggaaattgctgggcaggtgggggagggctagtcatggaaggaaactgtaagccggaccgggtgtgaggagcggaggtgataaaaggattatagggtggaggagcagaggctgaggaataattgggcctggcgaggaggggagaggtcagatgggtctgtagaaaaggaagattagaaagactgagcgatgcttggggttgggactgaggggacaggtgggagggaaagaaggaagatttggaaggagttgcattgggaacagagactggggaggggcagatgtgtaaaagaatgcctggacatcaggcacctcagaccgtttgcctattttatgacaagaattatttagagcttgtaggatggaaaaattgaaagtgccgttttctggctatttggaactactgtcaagtttgtactggggtcaagtggcatcgcagaagaaaataaggcatttaggttttaggtcaggtgtgagttgaagaggttttaagttcttgagagcacaggctaagggagaaaaaggaggaatggagggtggaaggttgcccatagtgaaggaggcaagcccagagaaaagggagtagagacacggagagaaggggtggggggttcttgtcccccagaaaagcggagaaggggtagagacatggagagaagggttggggggttcttgcccccgagaaaagcggtacttgccgctaaaggtgaaggaccaaggcaggcgtccccgtgtggtcagacacctctgaaatgtgggtgaataatcaggcaggcatccccgcgtgattaaataccaagggaagactcttccgagtccgtgaccggtgccggagttttgggtccacggataaaacgcatctcctgtctctaccagaaaaggaaaggaactgaagttaagagaagggagagattgaagtggggcgccaagattgaaaggagaaagaggttgagggatagtgagaggttggaggagagagtaaaaagaggccgcttacctgatttaaaattggtgtgatgttccttgggctggttagtctgaggaccagaggtcgtaggtggatctttctcacagagcaaggagcaggaggacaggggatagatctcccaagggaggtcccctgatccgagtgatggcaccaaatttcatgcgcgtccgtgtgaagagaccaccaaacaggctttgtgtgagcaataaaactttttaatcacctggatgcaggcgggctgagtccaaaaagagtcagcaaagggagacaggggtggggccgttttataagatttgggtaggtaaaggaaaattacagtcaaatggggggtggttttctggcgggcaggagtgggagtcacaaggtgctcagtggggaagctttttgagccaggatgagccagggaaaggaatttcacaaggtaatgtcatcagttaaggcaaggaccggccattttcacttcttttgtggtggaatgtcatcagttaaggcaggaacaggccattttcacttcttttgtgatttttcagttacttcaggccttctggatgtatacgtgcaggtcacaggggatatgatggcttagcttgggctcagaggcctgacaacaacgatcttgtagataggtactgttgtaattcccagtttacaaataagaagactaaggtatagagagattgagtaatttgcccaaagcccacagctagtaagaagccaagattcaaacccaggtaatatggctgcagacctggtaatcctaaccattacattaggctgactctcgatagttaacttatttaagctagtgttaatcacatcttaacaagtttgagtaataaaatcttaggttgaaaggggccttcaagatctagtctaaatcctttcaggagttcttccacatttctgctagaaaacactttggcctaggcttaaaacttagtgatggggaactcctcactttgtaaagcagcctgttcagttcacaaacaccctaataattaggctgttatctcttgcattgagctgaagttgatcttcccataacctctgcctttctgtctatatgtatgctttggaaatatacacagtaagtgtaaaccctcttggcaaagacagcccttcaaatacttgggaggcattcaattccccccgccacctcccgctctactctcactaccaagtctttagaatagagtacaggtatcaaaatcaaaacaaacagggagtagaaacttagtgccagactttaagtattttttacttataaaatctttttgtgtaacgagtagagcaactcctaactgcatatatgtactaagtttgcaaatggggcaatttgtttttccccatgcactggcatcagaggtggtaaatgctggcctgtcagattcaatgcattttgctgggttagaaccgcaagggctttccaggggaccaagctctctctgctgtaatcattaaaacctgcagaatcctgtgtgactctggggagaagcccagtgctcttggccctcatccaccctcactaggaaagctgcttaaaactaggacagaagaaacaaccactggcttaggatcagtcctcagacctgccttggcactaccccttttattccaaattttgcagtggcacctccaacttcttggtcacgttttgtaccttgtctgtttcctcatataacttcattccaaattccaacccatgctctgacatttcctctccattcttgctagacaggaatttctggatattggatattggcccctgcccataccctgactctgtatattcttttgtcctgctgaccagtttgagcttctgaataacaaaaactccccaaccactttaaagtcctctactttagcttgatgggtccctctcctgtattttctgaccttgactctgctctctgtacaaatagtaattacactcacccccaagcagagaatctgtgtcaaaatccatcaggatatctaagcacatcattatatctgtcaacttccccagactcctgatctcaatcccttattttcaacaacctggcaccgacagagtataatttcttttgtatcatgatgcagtttgatgtgcttttcgaaaggttatggtggtgattttaaagagatctgttttgttagaggaaggaaggaaaatagtgctgtttgcttccatgcagttcctcagagcctatgccagggtgatttcagctcatgagagaatctaaagtctaaagagatgtgtggagattagaaacattggtgtaaaaaatcagattacggagacgtaatatccagggtgtcagaggaggcagggagcttcaatcatgtttgaaactataggtcccacccaacaggatgagaaaatacaggagaagccagaaaaggtacctgcttgtgggtaaaatcaattaaatggaatcaatggtatggtagccatcatttctttcttttcaaattgtggtaaaaacacataatgtaaaatttaccattttaaccattttttagagtatagttcagtaatgttaagtatattcatgttgtcatgtagtggacttgcagaactttttcaccttgcaaatctgaaactgtacccattaaaccacttctcatttcctcctttcccccagcccctggcagccatctttctactttccgtctctatgcatttgactattctaggaacatcatgtaagcggaattatacagtatttgttcctttttggactggcttatttcacgtagcataatgtcctcaagtatcacctattagctgtcattgcttgaacacggttttctgccaagcacatgatctcgttttattcccagcacaactctcaataacaactgtgtaccttttttccctttcacagattaggaataaaaggctctccaagactaggctcagaagcagaagcagttggagagttgcttgcagaaggattattgtcatactgggaagtgctctcaggatttacacctctaagaaactgaaaggggcatgactgcgcagaggaaaagctggttcaccatgcagttgcaattatggctgcagcaggagcatgcagggaagctctggagtaggtttggcctttcagagttgtccccagtaaatcaaatgggtgaagactttaacccatttatgctggaggttgcaaaaatgttttgtgaaaagtcagaccttggcgatgaccttgagcagtaggatataaaaaactcccacaagcttagcgtcccaataatggaacactaggcataaatgagttaatccctgcatcagccagtcattggccctaggtctctccctgagggaggggatgtagctgtgtgaggcagttccctgagggcacattccaatgaaggccccagctgtgagccagcagccaataaggcagcaggtggcccatgcatgcaaaggccctaaagaggaggtccagggtggagcgccacggtgtctactacagatgctgaaagagtaaatacattttatttatttatttatttattttattatactttaagttttagggtacatgtgcacaatgtgcaggttagttacatgtgtatacatgtgccatgctggtgtgctgcacccattaactcgtcatttagcattaggtatatctcctaatgctatccctcccccctccccccaccccacaacagtccccagagtgtgatgttccccttcctgtgtccatgtgttctcattgttcaattcccacctatgagtgagaacatgcggtgtttggtcttttgtccatgtgatagtttactgagaatgatgatttccaatttcatccatgtccctacaaaggacatgaactcatcattttttatggctgcatagtattccatggtgcgtatgtgccacattttcttaatccagcctatcattgttggacatttgggttggttccaagtctttgctgttgtgaatagtgccacaataaacgtacgtgtgcatgtgtctttatagcagcatgatttatagtcctttgggtatatacccagtaatgggatggctgggtcaaatggtatttctagttctagatccctgaggaatcgccacactgacttccacaatggttgaactagtttacagtcccaccaacagtgtaaaagtgttcctatttctccacatcctctccagcacctgttgtttcctgactttttaatgaccgccattctaactggtgtgagatggtatctcattgtggttttgatttgcatttctctgatggccagtgatggtgagcattttttcatgtgtcttttggctgcataaatgtcttcttttgagaagtgtctgttcatgtccttcgcccactttttgatggggttgtttgtttttttcttgtacatttgtttgagttcattgtagattctggatattagccctttgtcagatgagcaggttgcgaaaatttttctcccattttgtaggttgcctgttcactctgatggtagtttcttttgctgtgcagaagctctttagtttaattagatcccatttgtcaattttggcttttgttgccattgcttttggtgttgtagacatgaagtccttgcccatgcctatgtcctgaatggtaatgcctaggttttcttctagagtttttgtggttttaggtctaacatttaagtctttaatccatcttgaattaattttcgtataaggtgtaaggaagggatccagtttcagctttctacatatggctagccagttttcccagcaccatttattaaatagggaatcctttccccattgcttgtttttctcaggtttgtcaaagatcagatggttgtagatatgcggcattatttctgagggctctgttctgttccattgatctatgtctctgttttggtaccagtaccatgctgttttgcttcctgtagccttgtagtatagtttgaagtcaggtagcgtgatgcctccagctttgttcttttggcttaggattgacttggcgatgcgggctcttttttggttccatatgaactttaaagtagttttttccaattctgtgaagaaagtcattggtagcttgatggggatggcattgaatctataaatttccttgggcagtatggccattttcacgatattgattcttcctacccatgagcatggaatgttcttccatttctttgtatcctcttttatttccttgagcagtggtttgtagttctccttgaagaggtccttcacatcccttgtaagttggattcctaggtattttattctctttgaagcaattgtgaatgggagttcactcatgatttggctctctgtctgttattggtgtataagaatgcttgtgatttttgcacattgcttttgtatcctgagactttgctgaagttgcttatcagcttaaggagatttggggttgagacgatggggttttctagatatacaatcatgtcatctgcaaacagggacaatttgacttcctcttttcctaattgaataccctttatttccttctcctgcctgattgccctggccagaacttccaacactatgttgaataggagtggtaagagagggcatccctgtcttgtgccagttttcagagggaatgcttccagtttttgcccattcagtatgatattggctgtgggtttgtcatagatagctcttattattttgagatatgtcccatcaatacctaatttattgagagtttttagcatgaagggttgttgaattttgtcaaaggccttttgtaaatacattttttaaggtcacacaaatgacatatgggacagaacagtgtttaacttcaaaactcatgttctttctgctatactgggccttctctccgaaagaggcctaatttgcacactacagtcaagcttagaatctattcatagttaaaatgtggagtcaaagcccaggaactatgtccttcaattcatctttcattacttacctattccttatcattcccgctgacaccaaccattttttctgacccttgtcatgaggagtgaagttgtatcattgcagcagctttctacttgtactctatgcctaaaatctctccttcctccatctggtcagccaattgctgtcaagttaatcttgcaagaacactacttttgccagtttaatttcgcaaaactcctgctgtgtgccaggagtgtcccagacatcaggtagtctaagataagcgatagtctctgcccctaagccgtttgcaacctttggagagacaacgtcattatcaccaccagcacccccattaagctcagagctaatatatgccagatgagactctgccagtcactgtgctaaggacttgacatacgttatctcccttaattctaacaactactttctgaggtacctctgatgagtagtatcatttttagatacaaaagcagaaacttagcgagttaagtgctttgcccagtggctctcagttgagaaacgaggtagtcacaccaggcagtccaacttcagtacctgagttcttaatcatcatgtttacaactttggctcaacattgtcaccaagatcgggttcaaatacatccattatcaatattctttctgtctccttgtatgtccaaacaaacaaaacaaatgcttccctcctgatgaggaaagtctccaaatcttgatacctgctgtgtctggacagtttttcctgctatttgctgagtgctggaaggattccctcaatccagatgtgattgcagatccagctcaagctcagcgtcctccagggaacctttgaactaaccacccagaaacgagcctttcaccggacactactcattttcacatatctagatcttatttccccatctgaactgtaagtgtcttaagagctgattttgttgttttttaataaaaaataattcttagttttttttcttattaccaaaaaattattcgccattgaagccttctgaatttttaataagaaaactattggtatattgcttcaaaaagaaatctaagcttctagattcttgaaaagggatagtgacagaaccttagaattaatattcaatataactaatctgatgaaaattcagtcattgatacattactgagaactactagatctcagcatttttaattgtagattcacatggagttgtaagaaattatacacggactccacatacctttttaccgagtttcctctaatggtacacctgcaaaactctagttcaatgtcacaaccaggattttgacgtcaatattgtcagtatacagaacattttcatcactacaaagatccctcctattggccttttatagccacacccacttccctgccccccctacctcctacttccagcaactactagtctgttttccatttctttaattttgttatttcaataatgttatatgaatggaaccatacagtatgtaatattttgggatggacttgactcactcaacataattccctagagatttctctttttatatgcagcaagacttgtttcctttttatcgtgagttgtatgctatggtttggatataccctagtttatttaatcactcaccccttgaagacatctgagttatctgtagttttggactattgtgaataaagctaccaacattaatgtacaggtttttgtgtgaacataagtttttatttccctgagataaatgctgaagagtgcaattgttaggtcatatggtagttgaatgtttagttttaaaactgccaaacttttccgaagcgtctgtactattttatattccaccagcaatgtatgagtgatccagtttctctgcatcttcaccaacatttggtgttgtcattattttttatttttagccattctgatatgtgtgtaggaatatctcattgtgcttttaatttacgtttccctcgtggcaaatgctgttgaacaacttttcctgtacttgtttgccatatgtatatcctcctcattgaaatgtctgttcatgtcttttgtctattttctaattcaaaagtttttttatagttcggttttgagagttctttctgtatcagatactagtcctttcttgtgtatagggttttcaaatgttttctctctcatcttttcatcttcttaacaggggatgaaaaagaattttaattttggcgaggttgaatttatcgctttttccttttatggatcatgcttttgtgttgagtctaagaatactttgcctagccctggatcccaaagattttctcctgttcttttttttttttttttttgagacggagcctcgctctgtcgcccagcttggagtgcagtggcccgatcttggctcactgcaagttccgcctcccgggttcacgccattctcctgcctcagcctcccgagtagctgggactacaggcctccaccaccacacccagctaattttttgtatttttagtagagacggggtttcaccattttggctctcctgttttatatgtcttatagttttacattttatgtttaagtctgtgatccatttgatttttatataaagtatgaggtttaagttgaggtttattttttgcatatggatgttcaattgctctagcataattatttgaaatggctggcttgattattgaagtaaggtcagacttatttctctcctgggcttcagacccagccaccttctatgtttcttgtccaccacaacctgaatgtcccacagacacctcagacttaacatgtccccagcagctcattattatcctccttttgtcccaatccaccctcaacatttttccctccctaattgtgctgttcttatgaacgctacgcttcacccaattgcccaagtcaaaaattagggtattatttctgaatctacttttatctttaaatctaacatgatgcattgccaaattctgtcagctctatccccaagccatctcttaattcattcccttatttacacctcccttgactccaatatcttttgactcaaatgctacatagcctctaatttatctccctgatattgttcttgcttccgaatcccttttccacaatgcgcctatagtaatcctcctaaaatgcagatctgattaggtgactctccttattttaaagtctttcttattgttttctcctgccctaaggcagaagttccaacaaatcttgttatcagattctggattaaatcccggcctcagcagtgggacctaagatagtgcctgaatttccatgaacatttattgatgacaaagagggtcttaaataatgagtgatgtagactttccactgtcaacatcacagattctggtttttaatggtattcacatttgccttctccaagagtccaggtttaatgatggtgagacctatcctaagacctggctttgtagtgaggggttacctcatcacagaatcaagaagggacctcgggccgggcatggtggctcatgcctgtaataccagtactttgggaggttgaggtgggcagatcacctgaggtcaggagttccagaccagcctggccaacatggtgaaaccctgtctctactaaaaatacaaaaattagctgggcttggtggcacacacctgtaatcccagctacttgggaggctgagacaggagaatctcttgaacccgggaggcagaggctgcactgagccgagattgcaccactgcactccagcctgggcgacagagcaagactctgtctcaaaaaaaaaagggcggggggacctgggtgcaagtaattctaagaagcaggaataagagaacaagaagaatgaagcgacaaagaaagatgagcaattctctggaactgttgagaagtgtacagaagaaaacaaatctggatataggtagctacagcctgaaatatggaaagccagagcatgtgtatacctgctcctgctcccactggttgagaattgattcctttttcatctgatatgggcaagcattggatctgagtgggacacatcctctccagtgcacccctgccttttccgctgctctgaacttcacacaacgtcggaaagattcaaaacaatgtagaaaatctaagtataaatacaaaaaggaaacaagaagtttttctatcaaagctgtgaactatatgatatgagtaagctcaataaacactgtgcagaagttgggaggggaaaaagagaattgctgccaaagcactaacccctgtggctggctatgcttgcccacccaggaagctcccatgtcatgggggtcaggggaacctagaacagaaagctgaaaggctcagggatcccttttgagaagggatgctggctatacagcacgagttagaacttgcacagaaccgtccactactgctgacactggaatcacaggtgggctgacaagatgtgatgcaagcaccagacatatttgctacaaacctcaaagtggagcagagcagcggcagtgtcagtcttcttggtgtcaatagaatacctgtttatttgttgaattctccctatatgaataataataatacaagaattcaaagcaggataggctttgtgtcattggaggagtatggagaaccatcagtgcagtaagtgtcgtgggaggtttctagacagtttttaaaagtcgatattgagtcaaccatcaaatgtgaacaattctgatatgccagagcatttgtattcttaactcatggggttattacaaagatcaaatgaaataatcattataaagcactttgtgcagtgcctggcacaaagcacgcactcaatacatgttaatgtttatacaattattattattgattgtcagaattatcagccccacatcagcaaagaatagtaggtggtctgtcagcaggaacatggaaacattctcattacatagaagtcagtgttgcagggacagtcattaaaacaggatctaattttagtcttctgagggaaaatgctaggttctccggaaatgttgaatccttcctcgagcatgtagtttaatttttcaaaattatattgcatatcctgtaaaatgaaaatgaaattgtactgctgttcattaaaggcccccaaaaatcttaggcactatacaatataaatgaaaaaaaaggcgttatttttccatagggcataattagaaataaagaagcaaggtcactcacaaatttccgagctataaaggaggaaaggaacaagattttcccccggttattttatagctgccaggttgaactcatacttatccaatgagccccagaatggaataccgttctacaccaactgtactgatgatagtgattcagggagtaaatgataagattccatccttctaaagtgcttttgggattggattctagtaagtttcattttgctattggccaatcacaaaagagactacaatagagaaaagtgaagacatcatgctgaagacagactgctgcatagaaaaggaagagggaccccctaatttagagatatggatggagaaaaaaaggcacttatgctgtagcataagggaaacattaaataaagctataatagaggagaaaatgtctttgaatagaagaaaaaaatcagacagacagaaatagactaaaatgctaaaaaaaaagatacaaaaggacattgaaggggacatacagtgattattacacaaattaaatgcacacagttaaaagggaggtgaaaagcttctaaaaagaatgagtgtgtagtgaacttaattttatcatctttactaagacaaagttaaagtccctaaaatattttaagacacttaaaaaaaaaagtcttaaaattttgagagcctttcagctctgtcaactctagactttccctcctacttaagttttttttcttttttttcttttatcttttttatttatttatttttttttttatgttttttttttttttttttttttttttgagagagagagagagtggatcagccttaataagagaatggtcttctgccaggtggtattctcctaatccctttccagtgagatccacaagggttcaaaaccactttctggggtcttagaggcaccacttatctctcttcctctgctcatatctttctgctccagtgcccgcatagtttgtgttatcagtggtgcgtagcctgagacatccacgacctatgccagctctcgaagtaatgtgattggcatccaaagaaacacaagaagcccatgatttcgtccctttgcaatttaaaatcatatttaaaatgccttttggtcatacaaatttgaaaatgatcttgtaaatcacttccgggaatctatggtcaaaactcagcttagagttctctacttcttaacagagtgcctgccggtaactagtgactgtcaatgagtttgaaaacataaattgatgtgcaaatgctagataatagcaacatcctgtgcaactgggcagcatttctgttgtttggcttttttattttcgtggactctcccaatctgagagaaaatagatttgagttcctttttaatcggtttagacccagacaaggatttaattggtttagaccccattcacctacgtgtgtcactctgtctccaacataacagaggagatgaccaagacaacatgctctccagccaggaggtggggaatactttggtgtcatagcagacaattattgatggaaaactcatgttagaaaatgtaaggtaccttcttctagacggagtaaaaggggcagctgcccagactttcattttaaatagggagcccatgatacaaatcttttaatacaattttaaaaagaagagacatagggggtatctcttaggacctgtcaacaaccaaccctctatcaaatggccaaatcacaggtggtctgcagcttagccaaaatgtccaagtacctttttgtaacacagaatctcctttgaagatccagctttcattaatgatccccagcagctctggtcaatgtgtcttttcacaaatgaagctttttaaaagctttcagtggacaaatgtggctttgagttttcaactaaatctttctgtttaaaaggagtgctgaaatgggcatactttataatcttaaatgctgcacacaaaatactgaaatattattgaccctgagaggttggttcaaatcaaatagcatactcacgtaaacgttctcttttcctaatattagcaacagggaatgtgaaatagagaggggcgggatatgctggataggggtgcaccaaaattttcaaaaagcctcgaaactagtgtatattgataaccttgtggcatctaatatctagtattctttttttttttttttttttgagatggggtctcgctctgtcgcccaggctggagtgcagtggtgtgatctcggctcactgcaacctccacctcccgggttcaagtgattctcctgcctcagcctcctgagtagctgggattacaggcgcccgccaccacgcctggctaattttttgtatttttagtacagacggggtttcaccgttagccaggatggcctcgatctcctaatctcgtgatctgcccgcctcggcctcccaaagtgctgggattacatgcgtgagccaccgcacccagcctagtattctatgtctattatttcttcataatgagactgggggaaatctttggagaattaatgccgcagttggtaaaatcattctataataatgggtaccattctgctctgtcccacatttttatgaagtctctttaaatttaaaaaggcaatgtgctttgtggttcttgagcaacttaaatacgttgctctgaatagttattgtgatgaggtaatttgtaacaacttttaggatcaatgctaattttcttaaatgtttctgtagtttcccctttattataaagtatattaggctggactcttggctgtaagtgacagaaaactcaactcagattagttaagaaacaaaagggtgttggtgacagtggtggctttcagactattgctgcaggcccacctgccatcctcttaacaccctcaacataccctgcagaaaagagagagctactctgacccgagagcttaaagactggtcaagtatgggcttgactctttatggcccaaattgggtcacatgcccacctaggctaggggaatggaatcgtggaattgattgattgattattgttgcaggttgagtcctccaagaagcagatgccagggcagatttattgcagaataacacctgtgaagaaataggggtggaagcagaattgaacaagggaagccatcagatcacaatgcagatcttctagactctgtgtcagcacaacaaggaatgccagagcaaagactgccaattagaggaatactgaattgggcagatctgacaatagtctgtatataactcgggactgttaacttctccttcctcaaccagttatagacatagaataggactctcttatctcaaacatcaatatctgtgtatatgaagtagagggtgaaagtttactgtacactagtggttctcaaccaagagcaagtctgtcccccaggggacatggcaatttctggagacattttcagttgtcccaactggtgaggaggtgctactggcatctagtgggtagaagttgtggatgctgctaggcattctctataattcgtgggatagatagcacaacaaaaaattgcccaggccaaaatgtcaataatgctgaagttgagaaaccttgctctataaagatacatgtcttggccgggcacggtggctcacgcctgtaatcccagtactttgggaggccgaggtgggcggatcacgagatcaggagatcaagaccatcctgggcaacatggtgaaactcatctctactaaaaatacaaaaattagccaggcgtggtggtgcatgcctgtagtcccagctactggggaggccgaggcaggagaatcgcttgaacccgggaagcggaagttgcagtgagccgagatggcgccactgcactccagcctggtgacagagcaagactctgtctcaaaaaaaaaaaaaaaaaaaaaaaaaaagatacatgtcttatgtgtactgaaagaggccacggaaaccttttgttgatacattcttgatagtttttgttcttatatgtagttatgaatacttgagattccatccaatttatttaacttttgaccagaaagggtagattgaattggtgaaacatctatatcctgaatatttaaaagattctgttttttaaaacaaatattaacttgaattaacgtaaatattcttagtagttaaagtccttaaagaccttagtttggtgaacagataagaatcatctgtgttcagcatatgcattgccttatgaagatggtaagtcaaaagtatgagtttatttctgatatttaaatatccctgaggtatagatttgtttactctggaagtttactctgttgtttgtttgtttgtttttgtttttgttttttgagacggtgtctcactctgtcacccaggctggagtgcagtggcacgatctcggctcactgcaagctccgcctccggggttcacgccattctcctgcctcaacctcccgagcagctgggactacaggtgcccgccaccatgcccggctaatttaatttttttgtgtttttactagagacggggtttcaccgtgttagccaggatggtctcgatctcctgacctcgtgatccaccagcctcggcctcccgaagtgctgggattacaggcctgagccaccgcacccggccttactctgttgttttatttcttcattatatattacaaagttgaatgttagggccaggttagatcggaaaacaagttaagtattccttatccaaaatgcttgggaccagaagtgttttggattttttatttttgtggattttggaatatttgcatattcctcatgagatatcttgggatgggacccaagcctaaacatgaaattcatttatatttcgtatataccttatacacataccctgaaggaaattttatacaatattttaaatacttttgtgcgtgaaacacaaaagttttgactgtgacctgtcacatgaggtcaggtgtgaaattttccacttgtgacgtcatgtcagtactcaaaaagtttcaaaatttggagcatttccgattactttggaaaagtctagaaaaagtttgatatcagtgcactgaaatcattttcaagtaggaacaatagcgatactagccctttactcatgcaaaattcacagtttttatctaaacaacacaaaatcattcaatgcttttatatttaatcatctatattcacctaaccataaaaaatcaatttcaatacagtaaggaaaagacaagaaaacgaatcattctaatcactgtattttgaaagttctttgcaaacaaccgtgaaatggttaaaagataggaggatggagaccagcctggccaacagggtgaaaccccatctcttctaaaaaatacaaaaattagccgggtgggttggcgcatgcctgtaatcccgggtactcgggaggctgaggcaggagaattgcttgaacctgggaggcaggggttgcaatgagctgagatcatgccactgcactccagactgggcaacagagcaggacgtctcaaaaaaaaaaaaaaaaaaaagatggtaagagaatgatgacttgttgcttactaaaataaaggaaagattgacactataagtgatactgtttgaaatctcaggaatctctgaatcattaagattatatcacaaatggcatgcaaaatacctgttcaaaaaatactcctcatggacatgagatgctaagctgctgatactgagtctgacctaggacaatgatgttctgtgtcacctcttttctgatgcctcccagattgctcctggcctcactgctgtctcacttccaaaaatacatattgcccttattggtcataacacagagactatcagttcaaaagtctctaattcgtctcagctgcagtcatctcccagcaagacacaaggttcttgagaaaagaaatttttcatgtcccatctttgccatccaccacacgatgaacatacagtacagtgtacatagcagcccttgaaaatgctggtggaatcattgattcttgaacccaactgtcatactttccagatttaagtcctggtaaatgattaaaatcgtatgggttaccctcaacaaaccagctcaagtatttactataaaaaagggaagctagatatggaacttcccctaaagatgggtctgtcaaactcaccccattgtattctgctctgacaccatgttttttgtttgtgttatttttttttaagagacagggtctcactatgttgcccaggctggtcttgaactcctgggttcaagtgatcctcccacttcagcctcccaggtcactgtgagagattacaggcttgcaccaccatgcccagccccaccttttaatacaaataagtaacagttaccatttactcagtgctcaccttataacagatgctgttaaacgctttacacgccttagctcatttttagttaaatacattgtttttgccccagctatggtagggatcttgctaacaatgagaatgaatgataagaggggctttaaggagaattcactgccacacctttcataattttcccatcattcctccagtctttgttcaaccgtccatgatttactgatttgctattacatcaaactatgctgcaacaaaccagtggttccttctgatttttatccatctcctcctcacctagggtgagagtctgaggcttccttgagtctactttctgatattgttacatttaacacagaacatctcttgttttcgtttctggcagcttatcctctcttcgctttctccatgctttcattcatcctaaaacaccattctgacaatgatatttaggttggtacataagtaattgtggttttaccattaccttcaatggcaaaaactgcgatcacatttgcaccaacgtaatatttttcttacttaaaaaattaatgtagagtatggaaatacttgccatcagggaatggggaagaaaatggctagagagacatggtgaaagagagacttgatttttaaataactttttttgtttttcttgaattttattatcatgtgaatgcatttgaaagaaatacaattttaaaataattattaaaaaaatatttgaatgccttcccatgaacaactaaatgaagtctctattcttaaacctgacagtcaagtacagctctggtttgactccaagctacatttctagccttgtattattcaactctttttctgtttatccttcatatccgggcctttactagtgccaaaaaaaaaaaaattgctcattctactcttgtcacccagagtgtttcttctgtttttgcccatcaaaagcttacccaattgtgaaggcccagtttcaaagcaacctccttcattaatttcatccagatactctgtaacccccatagctgtttaggcttgttctagcaatttgcagttatcagaaaaatgagtacataccgagtgccagaaagtggtctctccaactgtgcacattacaacatctcattctctgtgcctccatttcctcatctgtaaaatggtcactatggtgtactttcctcatagtgatgttcattctttcaagtagttagttaggtacctactatgagacaggcactgacctgggtcctgggggtacagtaatgaataaaatagattgagtcctgccctcatcaaatttaccttctgataagaaagacataaatgaaatatacctataatgctcttgaaatagcacttgggatatagtaaatgctctataaatgtttgctattattactgtcattgttggtagtgttgttatgtggtatttctattaacacataaagaaactaaggttcacaggctgttagataagatgctggttaaatagctagtaagggactccaactcaggtcttcctgagtcataaaattcgtggcatttccactacactgatggatgtataccaggctgtacatcagaactatctgtggagacttaaagaaagtaaagattctcaagcctcagcctcaaattaactaaatcagaaattatttagacgagctaagaatctgtatttttttgaaaagttctcaaatagttgtgatacactgtcaaattggggaatgactgcactacattaaaatctttcccataatactttattatgcttatttgtaaatatcaaatctacaaattcactaaagaccatccccttgttttcttatttatttttattttttctgcttcctctcctagcaaagtgccttataaacactcaataagtatttgagtaattaatggcttaattatttaaagttgcacttaaaatgcaaatactcacagctgtggtactggaagcctgttatgaacaatcatttatcttcctagggttatttactaatcagctaaggacaagcagttgggaaagaaaggctgactatttgggaacagaactgagaaggccctcaaaccaaatgttagccacgttattgaacagcctagggccccgccttaactttacctacacttcgttgacaatttcaggtaaaatgcagaaaatatacgctaacaatcaggagattcctccctcacaccattgtagtttcatttcttttaagccgacacatgtctctcttatggaaaatatgggaacaacctgttttaaagaaagaaaaagaatcctttattcttgtcacaccacaaacatggagttcactgctatacgttaagattataaagcaaaatcccaaaaacgcagtgactgattattcacagtagacatatgaagtcaggaagcttattttttctctctttgctaaggcacaaagcctggggctatatgcatttttattacactgtactgtgttgatttcacttgaggattaaaaagagagttgaggcacagtgcacgtatcttgatggattttaggatttcttgctttcgtgaaagaaagaagcttataaagtacctcagattatcgcccagggaagtgtacctacttccatgatgacctagaaattcaatcttttgtttctcctataaaagatcacattgtactttggatgttttccctgtagttttctgcactatgtaaagccacatttggaaaaacaaaatagttttagtttagagttgaagtgaaaatatctgaaatagttcaggaaagtcttatgagcatttggggagcttacaaacagccttgggggtggggtgagggggaatgagggaagagggaggcagggggagagaagaggagggctaggtcagaagtgtgcaaagaagacagagggagagagaccgtagagactgtgagtccatggcagagttttaattctggttctcacacatctacacagagaaacaatggaagcacattgctccatcccctgtcctttactaagaagcgtgaagtaaataacttgtggcttatgatatgcgaagaagagagaagacagaatgttgtaggatttggaagtacagtagatgagatcttccggtttattgatttgtaaagaacggcttgatactggtttgtcagttctgcatcagtgagagaaaagaaaggcgcttttcagtcacttgccagaggaggagagccgggaagtggaaacagggtcttctggcggacaagcttccttgagtggtggtcaaattgactgtgaagggagtcaaggtcaggaagctttggaaatgctgcaaggatggtacgggatttaaggagggttgatttcctcggttaagggttgttgcagacttcagcaaattcccccttccagcctttattaaagaagtgtttagtagaacaaactgaaaatctacaagtatattgttacccaaaatataaaagcttctgccactgagatgaaaatgtttgatttccagtgctttatctttttgcatttatctacctgtttcagtcattcgttaatatgaatttcctaatatatgccgtcttttttttttttttcggacaataccagttctatggtatctcactgatgattatttcaaattgccacttttgttccttggaaatactcctgtgttcaaataccaggaggcataattatgtaattaccatgtgaacattatgctacttatgggccaaaatgcccctagaaaggaatgctccaatggcctcagaaaatttctgtgagaacgatatcttccaaatgtggtataaataaagctcaagaataaatagctaaggctggaatgtaaatgatttaatgtaatgatgttgtaaggtgagagccacttgactttagttcctgttgcaaatcatgagatacattaggaaaacttttaaaagggaacctattttttaagataaaatctgtatcaagttacatcaccttccaggcaaagtaattcaactttcctcttttctctctgagaccaaaaaaaaaaaaaaaaaaaaaggcagaagaaatgcttcctatgatctcttctcttcctgtcacaattttcataagtctgtagatgtaattaaaactaaagattttgacaaatgaaacaggataggaggttgattgctgcttttctaaattaaaatgaatgatacccttaaggtacttgggtctatgaagtcaatttaatgttgatataacctgactccattatcacagaatgaggcagttgcataagcaagaaaaccaataaacaaacatccaaagtgcattttagaaatcggtgaggtgaaagattaaaggcttaacaacggacaaagagcttgctgttttgttctctcttgccttccagtttgatggcagagttcatcagaattagaggaagaatgttcttggagaagcgttgggctggcactaggctaggagtcctattcatatcctgcctcgcttgtcttgcaagcatgcacagccccttcatttgaggcactgtttgcctcagcagagtctgtgtactcttctggtaggttgtatagaacataataaagggggagggctggaggagaaaggacagaaaaaggagggaataaaaaaaggagtcagattaagaaagaagtcagcacagaaatataaaatggaaggaaaaaaagctgtgatgcaggaaccttaaaaggtagattaaggatggtctcagatggcacggcattagtatcaatgccataagtcacacaaaatctattaagaattatgctcctactcagagtgagtgccatgttagcactagttgtttcccgtgatctatcctgaagtcaaacgcaagaaacactgtttaactcctaagtgccctaatgtcaggaaaacacagaaataaactcaaaggaaagacaattcagttaatctttgcattcaacaagcccaggttgttttgccgcagagctatacctatcacaaaacttcattccagaagatggccggtagaggtggctcatgcctgtaatcccagcactctgggaggcccaggagagtttgaaatcaagaccagaacttatctcagactttttttttttttattattttttcagttacaactcaaaagaatcagaattagaataataatggattttaactgaaagggattaccattagttaaaaggattttaactgaaactgtaatcagtctcaggagcgtttcccggataatgtttgggcacgtatttatgagtgttacttgtgaggatttgggagtaagaatgaacgaggaagttcctcccccaacacagacacatgcacacagaaactgtacaaactgaaaaacttcaggacaaaaactcgtgaatagactggagagtcatttgtgtgcatatgtgtggtttatttactagcatcacagcacaagagtttctgtcttttgcttttgtttttgttttaataggctcatttgtgtaagtgtcatgtctgtttcttgcattcccatggatatttatctagggtctagacaaactgagaaccagaaaatcaaaacatacgttcctagttacatattttctctagactggagtaaacatgatttatgtatgtagtaatcagtaagatgtagcttggacactaggaagaaaccacattgcctagcagtgtatttccacatggggaggtaatgcctgtctctcctaaacttctagtgaagataaaactcaaagtagagtaattaacagaaaggtcaaaagacaaagtggaagcccttgagaatctaaaacaaagttaaagaaccaacatttacatttagataaatttatttgaaataatttctaagagccatgatgttgttatcggtcctttttctttctttcttttattcttttggcttatttaaaagcaatgttgaagaaaaaatgaaataaagcttatctttcacaatacacagaggaatggactgagctttgggaaacagtcacagcttggaattaagagtgtgtgtcgtatcgtaatttagttggatgatttggtgctcattcattatacccagaattacgctttcaagtctaccgtattcatacttatctcagtgcctgacaaataagaggaactcaaaaagcctttcattcattcatccattcagtatttcttgatcatcttctatgtactaggcattgtgataaattcttaacaagacagataagatctctgtctttgtggacaataaacttacattctagtcaatatcttttgaatgaatgtagtgatatttcttactgaagctaagaaaggaaggtctctgcaaacagtatactgtctacagaactcatctgaaatgagaagaccaaggagaataatatatagccctcataactctcaaatcttaaatatgattatttaaaaactagagtaaaacaaatgtggaggagatttggacttcagggttgttttataaattgccgttttacatttttaaatctagtattataggcaaaattgaatctaaatggttttcttcttttcttttttttactttcatcatcaaaaatggaagaaaggaagaaaaggaggaaggaagaaaagaaggaaaggaagaagggagggagggaagtttttcaaaagcttgtgtcagggatcttgaaaaagaaatgattcattcaaaatatagttgttaatagtaaagatccgtgaataaacagtacattaattcattcaactaatattaatttagcacctattatatgccaggtactgtgctactcactgaggatttagcagggaaagatgtgtccctgtcctcatggaacatataaaaaaggacctttttttcctgagatgcttttactgaagaattgctgcaacctagattatgagttctcatggaccagatggcagttttctgcccatctgggatagttctgaagaatagaccctcgtgtatcaatcaaggtttcttccagttctaagctttcgtgatctatgatctaatagttgaaacaggatgtatgcttccaaaaagatgttatatttgtattacttttataaaaggaaacagagacatgccctattaattcagaagagattgggttcctcctggctgtttaaatcattctatttaaactcctttatctcttctttcttggctcaccttccaaagctcactcttaccccttttagtctcacttccctttcctttctttaattgctgagacaaattgttcatctctaactggctatacatgacatctccagttaaatgtttcactgttaggacaaattcattatgttccaaatgaattcatacatacatatgctatttcttccttttctgattttcatattgccaccagcaatatcttcattctcccagtcttccttactcgaaatccaagagtttatttgcttcttcagatattaatctccaacaccaaattggatagttcttcctcctttcaaaataccttctcatatgtaccttcttttacattgaatacaatacagccttaattctaatgcatatcaacccaagtctagtaagttacaacagcctctttctgatctcagtctcaggtgccctttcgaatctgttttacactatactgatcttcccaaaccctaactttcctctaaaatagtgagtcatgtcacagaaattttcagtggttctctttgcctgcagggtaaatcttgagcctcagagtctgggacgccttgctttgcatcatcggctttcaacatgactaactaattgtatctcactgtcgtcctcaacaccactgttctgcagccccaagcctttcttcagcttgtcactacttcttacctccaaacctttacacttgcagagatcagggactatagcatttgttttttgcctatctctttcaatattaacaaatacttataaaatgaataaaccaccaaggaaagaactgattgtgccagaacataagacacaggtatatcatttctggcttttgcttcctgttttgtatataccacggtatattgatttaacatacagccagttagaaagatctaatgcatggaggctctcgtttaatagattatcaaatttcatttccttgcataattgctcaaagaataaagtgctttgttcctaagtcccaagctaaagctttcgaggactttggttgctttcaagtttttctcattcataaatttgtttctttatttagccagttgtgcattcaatccacacaaaacctttctccagtgataatttgtggaaagaaatattttatgcttaattcttctcgctgtcataccttctcttaagtttgagttatgaagatggaaattcactttgatctcattttaaaatcttgacaatattgaatgtacactggaaactaccactggagcgctccttgtataagaaggcaaaattcttcagagagaagattgggagtctagaatgaactttgatgctgcatcggctcagtccctatgaaactaacattcttactagagaaagtggcctatggcacagtcataatcctttaccatctacatcttccccttgggatttctttctcagtatgtgcaaagatttctgatcagtgtccactcccatatggcatcttcatcttctcctctctacccccaaacactcacatttatctctagattgatttattcatgaaatgacccattctaaatttagaaataatgacatatgcccaacatttatttgcacgcgttttcccacaacctttctctataatcttatggtatcacattcttcaagaccaggaattgaccttgcattgggccataaaatacgttgaacaactgcagtttcatcgatatgcacactagaattggtctgcattcaataaactgattaaagaaattaaaaagccaattacttattaaatatttataaaatactttttttcaactttaatcttcaggatagcagttaagagcaagacccagactgaatgagtttgaatcctagctctgccaatttactaactactgaagcttaggcaagttttttttttttaacctctcatgcctcagtttttatgtcaatgaagtcggggggaataatattaactcctattgcagagttactgtgaagatgaaataacataattcatattgtcatgccacatattgcttaataaacattagccatttttgtattgtatgtggtgccctgcacattatagtctattgctctccttttttgctttttttttttttttttttgagatggagtcttgttctgttacctaggctggagtgtagtgacacgatctcggcgcactgcaacctccacctctcagattcaagtgattctcctgtctcagcttcccgagtagctgggattacagatgcccaccaccacaccaagctaatttttgtatttttagtagagactgcgtttcatcatgttggccagaccggtctcgaactcctgacctcaagtgatccgcctgcctcggcctcccaaagtgctgggattacaggtgtgagtcaccatgcctggcctattcctctccttttattaaccataatagtagcaagaacagtagctggtaacatttattgagcaattaccacgtgacagaaactaggctaaatgctttacattgtatcatcttatttaattcccacaaaaccctataagttatattattttccacattttactgataaggaaagttaagaataatttacccagggacattgattagtcaaggttctccagagaaatagaagcaacaatatacatatgtatgtatgtatgtatatgtgtgtgtgtgtgtgtgtgtatatatgtatgtctatgtgtgtgtgaatatataaaattaagtattatctcatgcagttggagactaagaagtcccatgacctgctatctgcaagctagagagccaggaaaattggtagtgtgatttcagtcccagtctgaaggcctgagaaccaggggagttgatgatgtaaatcccagtgcaagtgcaggagaagactgacatcccagctcaagcaggcctgcagggaaaaaaggaacatgcctttttgttctgtttaggacctcaactgacaggatgatgcccgcccacattggggagggcaatctactgaatccactgaaccaaatgctaatcttgtctgcaaaacaccctcacagacacacccagaaatagtggtttacctgggcaccccatagtccagtcaacttgacacatagaattaaccattacagacctgcagtcagtgcactcagtgtcagtaggcatacttgtttgttccgcatcgcttctcttctcttctctctctctctctctctctctctctcacacacacacacacacacacacacacacacacacacacacgtaccacatttactcatttactcatccatttgtttggtcaactagtcattaaacaaatatttgctaccatatactatgtgcctcctgcagaaagggttggagacattcgaagagaaaggtaaacaaaaaatggtccctgctatcaagaagtttccaatctattgcaagacacactcatgtccatataactaaaatgaattatatgatagaagtgcttcaggtataaaccatatactgttagaatgctgaggaagccattaattctaacctgggagatgaggaagtaaacatataaacactaacagcattgatctgggagagaagtggggtaagagcattgccgagagaaggagcagcatgaagaagccacgcacaagagttatattggatggaatagtgcaggacaggcaggtagttttggtgggcttagcaggtagagtttgggagtgcagggtcataaggttgggaaggtaggtttgatatgtccctcatgcttttgtgtatataaaataaagtaaatcctgcattgtaggggaaccccacttggttatccacgtatttgggccaagcaaaaatgggcaagtctagggagagagtgaaaaaatgagattgttctggatatacactaggcacttaattgatattggaaggccagagttggtttgagaccaggctacctgagccacttttctgatgagattaacatcgatttttacctctcgggaattctgcacaccacgggaactaccccctgagttctgattgctctgtgcaagctctgatcaacccctagtttagcatggactgttcacaactaaatcaaaatccagagttagagagctaggatgcctggagccaccacttatattggattggcaaaatgccaaataagtaagtatagcatgtcacccgtaaaattattcctttcttccccaccaagaatagaactcactaagttgacagcacactgtgtcaatatattatagaaaaacctaataggaagaaaagaatggcagttttcactgcatgccccctaaaggtatatttcttaataatttccaagtccactgaaaactgaattccgaaaattagttttatcttactacccaccctattttatcccaaatttaagccttgcctgtacttctttgatacttaatatttttttctttgaggtggagtttcactctgtcacccaggctggagtacagtggcgtgatctctgctcactgcagcctccctcctgcctcagcctccctaggagctgggactacaggcatgcgccaccacacctgactaatttttgtatttctagtagagacgggttttcaccatgttggccaggctggcctcgaacttatgacctcaagtgatccagccaacttggcctcccaaagtgctgggattacaggcatgagtcactgtgcccagcccataattaaatattaatcaaccactggttaattaataattatcaataattaaatatcactcaatgatttattatctattaatcaatattgcttctttaaaaatttgtcaaaaacaatagcctaagacttaaagacaagacatgtcatttctgagattctgtagtcacctataccaaatgtcaccctccctaatgtttttgtgaaagtaaagatttgtatttttttatggtactaattgaagcagtagttcatttgtggctgccaatgagttgactgtaaaaaaaaaccaaaatctcattttaacattgtcgagagaggaaatcctttgtgtttggccttggattgataaaaacgagtctggaatactatatacggtaagtgaatattaaaactagagttatgaaatgttgctttagtgttctcagtcttggagactcaaagtatcttatcagaaaggatacattgttttaattgttcctcattatatagaatgagagaacatcatttctctccttttcctcccaggtggccgtcgaggaccgagtcaggcagctgcatgaagcccacagggactttggtccagcatctcagcactttctttccagtaagtcattttcagcttttatcacttaactttattgcatcttgattaataagaataacagttgaaaaaacaaaagaattaagagttgaattatagtaatcttttatcagatgcagtagaagcataaatcatcctgaaatataacttggttgataagttgagaaggttaggaagaggaaggccaattggatcattttgtccagtcttcagctaatgcataattgtttcctgcactatattctcaaatgttaaccatattaatatttttgagtctttttgaaaaatgtggaacactttgctcaggagccatgctagtattctctgtatcattattccaatgttagtatatgggctgctgaagcaaaaacatacttttgagtttttaatttctgcctatcagttcagttcataaagctaataattatgatatcatgtaattataatatgatcatccaatatatgttactgtgactctataattctttaaataattcattaaatgatccctgccttatgaaatgagtgacaattctcaaaagaaggcatacaaatggccaacaggtatatgaaaaaatgctcaacatcactaatcaccagggaaatgcaaatcaagaccacatgatatatcgtcttaccccaattagaatggctattattcaaaagacaaaaaataacagattctggtgagaatgtgaagaaagggaactcttttacagtgttgatgaaaatgtaacagtaaattagtaacagtatgaagattctcaacaaactgtaaatagaactaccttaccatctggcaatcccactactggttatccatcccaaagctaagaaatcagtatatcaaaagggtacctgcacttgcatgcttatcacagcactgtttaaaacagcaaagatgtgaaatcaacctaagtgtatatcaacagatgaatggataaagaatatgtggtatctgtacacaatgaaacactgcaagaatgaaaccatgtcattcacagcaacatggatggaactggaggtcattatgttaagtgaaataaccctggcacagaaagacaaaaatcgcatgttcttactcttgtgggagctaaaaaaattgataataaacatagaatagaatgatagatactagtggctgggaaaggtgtgtgggtagagggggagataaagagagggtggttaatgggtacaaacatccagttagatagaaggactacgttatatcatttgacagcagaatagagtgactgtagttaacaacgatgtgttgtatatttcaaagtaccaagaagaaagggcttgaattgttcccaatacatagacaaatgacaaatactcaaagtaatggatgcctcaaataccctgacttgatcattatgcattctatgccagtaaaatatcacattacctcataaatatgtaaaatattatatatcaataataaataaatactatgcctccaagttgaaacctcagcctatgggcatttcctttccctaactgtttgcatccttcctttttttttttttttttttttttttttttttttttgagagggagcctcattctgtcacccaggctgtgagtgcagtggcgtgatcttggctcactgcaacctccgcctcccgggttcaaactattctcctgcctcagcctcccgagtagctgggactacaggtgtacaccaccaggcccagataatttttgtatttttttagtagagacgaggcttcaccacattggtcaggctggtctcgagctcctgacctcaagtgatccactcgccttggcctcccaaagtgctaggattacattcgtgagccttgtattctccttttgttcttgacctctagccattctttttatttactggttttgctattttattaattatgtttttataattaatactaagagaaataaccttggttaactgaaagtttaagtattagaaaatcctatttatacaatattgcatattaaattggcaagcacctgttttcctctgattaatgttaatttataccactttttatttgattataaaagtatatgtgttgagttttttggtatttaaaaagccatactttaccacatggagttaacatctgttagcattctgatgtatttccttgtggtcatatatgagtatatatgagggtttatccatcattttaacgcaattactttgtgcctagaaatgttacagattttaactagtttaatccttatagcaatcccttcaatcccttaaggtaggtaccattattatacccatttcaatgatgaagaaactgaggcacacattcatacagctagtagatgagggagccaggattgaaactcaagaagttggctccagagtctgtgtttttaagcatcgcactgtaattttacttaatttatatattttatagagaggaagtaattctgtatgatctccattcttctgccatattctttcattgccattttctgatcatttcctttcttttccattctccacgggttaataaaaagatccacgctcacaaatactttaaagtatttgagtagatgttgtcatgtgtgtctccagttggctgttgtctttttgaacaaaatttcctggaaggtgttggtcctgtgtttttgtcatacatcgataatagattaagaagaagtatcttattttctggactggctctaactttattatccgcatgtggtctagttatttggacacagtttcacaatgctttggagttgccaagaaaaagggataagttaaagcagtttatctaaatgagtgggatcgtggcttttaggaacggctctagaaaaatgataaaggctacagatttcgtcttctgcatctttccaaatctctggtctacttaacttgccttggtgacagccattctattcgatttaattgagattaaatgtgataacatactcctaagcgactcataaaccataaataaaaaatagtactattatgaatattaattactcctcagacaccaggtatattcattcatattttcttctccctgactccccctctgaattcccatgtcttacccattaaaacctattttcagaaaatgatatactcatttaacccaagtgataggtaaagtttaatgtgtacttctcctgggttatttgcattttattagtgtgaaaatccataagcctgaggtggtagaacatcggccataagctctgagctgtgaggaaggaactttgaggggccaaggggagcattctcacacctttcaaaccatatcacatcagtgcccacttccagaaaggtcaggcctgttagacacaggtattcataaagagactgatctacctgcctgaatggagccagccccggaagtcatcagtctcttggatgcccatgtggaatatcaatatacgcttaaaagctttgcttgcaggtataaagaaaataccaacttggtttaagggatatttaagaaataggacggtgagactaaggatggattgtttctttacattgtactttttaaaattacaaaggtactctatacacatcaagaaaaatttggaaagcccacagtacaaacaagaaaagaaaaagtatccataatcctatgactcagagataatcactatcagaaatttggtttatatactttctgtatttctcttgtggttgcgtgtgtgtgtgtgtgtgtgtatcaaggttctatcttttatttttttatttttttgttttttgagacagagtgcaatctcagctcactgcaacctcccccgtcctgggttctagcgattctcatgactcagcctcccgagtagctgggattacaggaatacgccaccacgcttggctaattttttgtatttttagtagagacggggtttcactatgttggccaggctggtctcgaacttgtggcctcaagtaatccacccactgaggcctcccaaagtgttgagattacaggcatgagccaccacgcccggcctctctcttttcttttaaaccatgcgcagataaaaacatgctacagttttatgagctgcttttttcccttaaaactatctttccaatattttcgtgtgtttaaatattcttcttcagagtaatttttctaatgactggctaatactctcttctgtggctgtaccaaatttaccaacacaattctaaattgctcaatataaagattatttcacaatctttattatatcgagcattatggctaatatcctttttatacctttacaaatatctcagattctttctacaggataaatgcctaaaggtggaattgtcatgttaaagaatgtttacattcgtaagccttttcaagtgtattgccaaacttacctctagaaaattgcaccagaaattgggtgtgccatccaaaccgtatttgagctaggcatggtgtggctcatgcctataatcccaattctttgggaaactgaggcaggaggatcacttgagcccaagaggtcaaggctgcagtgatccataatccacccccccccgcactccaatctgtgtgacagagcaagaccctgaccctaaatttaaaaaaaaaaaaaaaatcaccatatttgaagcaggacatctctgaagtcacgtatttgctactataaaagcagcttccccccaccaatgaataaaaatatgttttaaatattcctctaaggtcatattaaatgaatttgaattgatacttttttttagacaggcctgagttgatacatgtttagtaatgtgctttcaggttactataaataataatagggtggctcctaaagcttagaaattacaaagaaaagaaaaataaggaggaactactaattgcacccgccagcgtaaacatgcttactgtctctgtttatcttattctctctctctctctgtctcgcacgtgtgtgcactctctctctctctctctctcacacacacacacacacacacacacacacacacacactcccctttggaaattatttggaaattacattaccagctgtctgttgtttatcagaagacagaggcagccttttactaaaaaaaagaattcactgtttcttcctggtggcccaatctctacatgttaaagaaattttttcttttatcttagatctaagagaaaatgagaagagaaaagcattgtgaaatatgacccttctccgctgatagacactaacttgtccttacttctagttttaatacactgctactcctaattgacttctacaacttaaaccaagaaaaaggagaaattctaatagtgtgacttcaaatatgtatataatttacaataaaattatcatttaaattatttaaattatatactaatttatagttatatatgtataattggtaggtatattgtcagtctcttcatatgtctgtgattaagaaagtactaaagtattcattggttggcatagtagtctgaaaattgtccttttcttttgaagagtttaaagatttgttgggcgtggtggctcacacctgtaatcccatcactttgggaggctgaggtgggcagatcacttgaggtcaggagttcaagaccagcctggccaacctggtgaaacccccatctgtactaaaaatacaaaaattagctgggcgtggtggcactcgcctgtaatcccagctgcttaggaggctgaggcaggagaatggcttgaaccctggaggtggaggttgcagtgagctgagatcatgccactgcagtccagcctgggtgatagagagagactctgtctcaaaaaaagaatttaaagatttttcctgaccattatttcaattctctggtcttctgttctaaattctacttttctcaccaagaaagatcactatatatttgggtaaagggagaaatcattctataacagtaaaaagaatccatggttttcttaatattttacaagttccagaggtcccttaaaagaatattttccaagccaggttctttaaaacattaatgttatattaggttttgataactgtcccttgaaaaaaatagtactgattaataagattggaaaaacactaggtttcaaagataagcaagtttatttcttgttagaattcttggaatttttattatacactgagactctaagaggataaggagtctatagttctccagttttaggtgactgtggaagcctttttcaggcacaccagttaatttcacactaaactttatgccatggatcacagtgaatctttgccttaatgtggtatttgccagatgctttaatgacaaaaaatttctgctaaaggttgtagaaacgtgatccaattaaaaagaaaatgagtatttatgaggcaaaagggtcaagtccctctctttactgaagttcccagccccactcccacccaggagccctcttgtgctgtggagtttcctaactggagataagcttagaaagtatctataccagtagtttccaaactctgaggtgtggctcattagcaaatcctaaaatcagtttaatgacttacaaccaacaatttttgactggtatggaatggaatggaatggaacagattagaaaatatcagagtgcattacctaagcaaggttaagtgttgttttggcggtggttaatttgttagatatgtgtgtacatgcgtgtgtgtgtgtgtgtgtgtgtgtgtgtgcgcgcgcgcacgcacgcgcgcacgccagatcacagtgtaaaacgtttttcttctgtgggttgcagtcgaaatagtttgagaaacattgaatcattcgagccctttccttattttacagataatgaaataggtgcagaacgatcaaatgacataaccaaggtcacaaagatagttataatactgggactggaacccagtttctggacatccaagccacacatcacactgccttacccgttaagaagaaatgcccaggccaataactgtctagtctatctgctattgccaacgattattctctcgtatattcctcttcgtttggccatcctaagttgatttacataacctaaatttttctctcaacacctctgggctaaaaactgccttatcaaaatggtatcgatagcggttaagagtaaaagctgtaaaatgaaactgactgggttcaaatattgactcagacactttatgcttttttctttctctttattcttcatctttaaaatagggataatagtaacatatttggtcaattgtaagacacacttttccacccacgtttcaacagttctgaaatcagaatgcaccatacgaccaatgggatattgaattcggtgaaatatggctgtattatttcatagggttacagtgaagatcaaacagttaatatttgtaaaacccttagagtagtgcctggaacatagtaagtgctattcaagtgtttgctattagctttagcattagtatcattattactatcagcttgatagtataacttaatgcatgcctgttagagtcaaactagtcatgaaagtttcattcattctcttgcatttaatggtcagtataagtagttcctctcctttctgaagatgatttccaaggatctaatctgaaagtccagtgttttgcacattagaacggctcaatagttgtttgtataactaacgagtgataaataatcaaaaagatagaccttaatctctaaaatgtcaggatagtattagtcttgttgacagttatattctacagtacctaatgtggtatgtggtacttggtagatgttcagtaaatatttacagaatgaattatgtcttatacccaaaagaagaagaggtaaattcactcttgacattgataatacacagaggcatgagatttagcatagtggctatcacatagtagacactcaataaataatgtgaccttttctgttgcttctcagcaaagactaatagcattcataactttatatggtcgtttttatcaaagtcgactgtaccatgtaatacattaagggaaaaggctgacttcaaaattacagcatgatcacaactatattacaaaataaaataaaaataacagaaatgtacacataaaggaaaaatggaaaataaaaagataccaaaagacaaacagttattgcatcatttctttctttttacttttacaaattttctggtaatagcatgtactacctttgtaatggaaaaaaaacaataaaggtaacattttatactccagcttttaaccagtgacctcttgcagtggcaatgggactctgaaagacaaatttcctttttactatttattctgaatttaaaagctgtttcattgagtgaccttctcagattatgagacactgtaaaaagaaataactgatccattatttcttgcaggctttacaatcttaactgccttaatcatatccctggttaagtctttttctctcttgtcaaagtgactcaagcttttacagtttctccttgatacatagggcctagcagtttgtttctatcttgagagttgccaagctttcatcctggacattccccactacacatacacacttaattttaaaaaataggggaaacctttaagcacatctaataattgctgacatttcacttaacagtgctccaacctatgctaccagtgtcctcaggggacagacaatttgaaatatgagtggggcaataatttaaagcttcagattggcttaaataagccatcatgaggccgggtgcggtggctcacgccagtaatcccagcactttgggaggccgaggcgggcagatcacctgaggtcaggagttcaagaccagcctgaccaacatggagaaaccctgtctctactaaaaatacaaaattagctgggcgtggtggcatgcatctgtaatcccagctactcgagaggctgaggcaggagaatcacttgaacccaggaggcagaggttgcagtgagccgagattgcgccattgcactccagcctgggcaacaagagtgaaactgcatctcaaaaaaataaaaacatcaaaataagccatcatgataaaagtcagaaagaattttgcaggtccaatgtgagatgatttgcaggctaaaattctctttcaagtaaaatctcagggtgaaatgatttgagccagtttcttcagcagtcacatgttgtcccaagtgttaggaatttgggacaaatgccatgtgacctaccagtgatgctgataatgcccctataaattcaaagacagcctttccaatgcccataaaaagcagctacagcagtaataattatattctcttcttaaaatgtgttgtcatggcccttttctcctttagctcaaatgtatactccccaataagctctcagatttatttgctttacagtatcattagcaaccagattttgcatcgttggccctatatatcccatcaatttgaacacatgaggaaacagaacgtttttgtttctgctatgggaatttctgtgctggggctggcttacaatggctcaagagagccaattgtaaaatatacaggaattgtgagctagttattaagcctacctttggtagcttgaaatcaggcatagtgggaagatttactccatggaaattggcaaatactacaaattggggcactttgttttttttttttttttttttttgtgcatagatggtttcccagaaatgactaatttatctatgttatttggatcactcaagtccctgtaggcaaagaatcttcataaacttagcaggaaggatgctcaggatccaaatatttatgtgcgttgcagagtgaccactcatcctggtttgtctgggactttcccggatttagcactggaattcccattttccaggaaatctctgtagtcccaggcaaaccaagatagttgctcaccctagccttaggtaaaatccctagaagtagagccctatttagatagatggggcttcttgtagaagtaatttgttcaggtgaaagggagtgagggaagcaggataaagtaagaaggatgctggtcaaggagttaagtgggaaggaagagactcacttcagcttgatcccacagggagctctggagaacaaattgtccctactttgagataaggggcctgggctttttgtttgtttgttttgagatggagtcttgttctgtcacccaaactggagtgcaatggcgtgatcttggctcactgcaacctccgcctcccaggttcaagctattctcctgcctcagcctcccgagtagctgggactaccgcgcctggatttttttttttttttttttttttgtatttttactagagacggggtttcactaggttggccaggctggtctcgaactcctgatctcctgatccgcctgcctcggtctccaaaagtgctgggattacaggcgtgagccaccgcgcccagccagggctgggcttttattttcccgtgtgaattagtcattggctgtggatttctggggagtaggagatagcaaagcagttcccatttggccaagggaggatttctggtgaaaggaccaatgaggccttagcaaccaacactcacaacaactgcggctgggtgaaccagctcagtaaaagggatctgagtggaacaacaatagtattaacctctcctagactttatgaagctgctatcataccccatgcataatctggctttagagctgaatgggcgcatttagctggatcactaaccaccactccttcgtcacggacttacatggaaattagcccggtggcatggaagagatgagacaaatgtctgtttctttcttatttcatcttcctcattgtgacagattcttctgggcctcatgaggagctagggccaagagaccagcaccagagttctgaatcagttttataacatgggcactattttggtggaatgctggctctgaagggtgtatttttacactacccagaaaatgaaggcatttgtgaatttggcctggggtagcattttgtcatctgtccaaaatacaaagctttgcacaacagaaatagtgggatcacatccctgtgggcaagaatcattactttcgtttttccatttggatgttttccattttcagaacacaaccagtttgggattacaaagtactttctggtgagaactttgaagtgaggacaaaaggcattttgttctttagtagacttacataaactgttcctggtttaaaaaccattctagatttttaaatagactttcagatatctgcagtaaaaatcatcttgatttcaggcgactgcaggtactgctctgttatgtgctatgtctccttaaggctgtaagggacagggataggcttaggtgataaggaacattttcaggatacagagaggcatgaagaataacatgggccgggcgcggtggctcacacctataatcccagcactttgggaggctgaggcgggcggatcacgaggtcaggagttggagaccaacctggccaacatggtgaaaccctgtctctactaaagacacaaaaaattagccaggcatggtggcgcacacctgtaatcccagctactcaggaggctgaggcaggagaatcgcttgaacccaggagacggaggttgcagtgagccaagatcacaccattgcacaccagcctaggcaacagggcgagactccatctcaaaaaaaaaaaaaaagaaagaaagaaaagaataacatggaacaacagacaccacgaaacatgtttgcttctttctgtatatgcatttgctgccatagacttcagactattacagtatcatatcttctctcttctctccacctaacaccttctacttatagtttctactttcttatgacttccattttcttcctttgttatccgactttttaaacttccccacccatctgtcatctctgtttatctctgtgtattacattcaagctctccaagacaaagcatctgattggattagttatttattatccatctaagggtaatgccatctcacaggccacaggccagactgtaaactaggctttcttgacctgggcactattggcatttggggccagataattagtggaatgctggctctgaaaagtgtatttttacactactcagaaaatgaaggcatttgtgagtttggcctggggtagcattttgtcatctgtcctagaatacaaagctttgcgcaacagaaatggtgggatcacacctctgtgggcaaaaattattgggggctgtcctgtgcattatctctggcctctactcactacatgccagtagcactcccctcccttagctgtgacaaccaaaaatgtctccagacattgtctgtctgatgtcccctgttgggtgaaattgcccctagttgagaatcactcctttataccaatgcctgcacaatttgtggtaatgaaagtcatgtggaacactaaatacagtgacctatgcctgaggaattatttgaagttgcttttctgcatccttagggaccctttagtctctcgatgaaagggagtgtcctcagcagacaatcttcaggaattgcatcagctgcctcacccaagatcataccccttacaggggcagctcttcctgatcagtgtaggggaataatgacctggccattttggcccaactcaggagaacattaacattctagctcaagagctcccatggggttgaatgagactgtcactgggtctgcattcaccttgacttctccctatttctattcctgtttctttcacttcccttccacagttgtctatcctgctctctaatcattgccttagagttggcttcctggaggaagccaatctgtgagggggcaatgaaattgacaggcatttagaagcatctaagaaaaaggtattataataggcccattacagtcactgggtaatttgatttactcttgctttcataatgaggttgattattttgttcaggataagtagtgattattattatttaaggtgtccaacctcatgatctccattaataggtaaggactttggggacagcataaaattacatgaatctcttaccttaaaccttaagctcagcagcatacatgcccatgacaggcaagagttagaacgtaagatggtcagtaacatagatcttgaaaggaaatatgttggagtgtgagcactttaagggcatagggcctgcattacttttttattaaaaataattttgcatctaacacaacatcttgcatattagatgcaggatatgccttgattgaatgaataactgggcacttaaaagattgttcccagtctaataaaatgaaagaacttagcctggtgcttagtctaatgtccagaaagagttaatgaacttcactttatcttcagtcagttaagaattgattcactttgttactcaacaaatgtctgttgaatgaccaatgtaaatcaaactctgatctaggaactggggaaacggcagtaaataaaacaaagtttatttattgtggagcttacattttaacaagagaagatggacaatcaggtcatgataagtttgatttaaaaacaaagaataaagcaggctaaaggggctagaggatgggagaaggggacccttttagtggagtggtcaggaatggtgacatttcagtagagatgtgaggaagtacaccagtcagatattgggggacaaagtgttccaggtggaggaaacagtaaaagtaaaggatccaagatggagcatgcttagagggtttgagaaatattaatagcaaggaagccagtatgactgaagccaaggaagaaagatggtgaatgataggaggtcagtgagtgaccaagggccagacgaggaagggtcttatcaactatggttggctatcgttaaaagcctttggcatatatgctttgtgagaagggaagtcatagaattctgagctaagaagtgacatggtgcctgtagcattgttacttactgtgcctgtagtattcattcattcattcctatatttattaacaaaaacgagtcacctgaaatatgaagataaaaagagaattattgccttgggacatttaaataccaatcacaaaagacagacctataaaaaatgacctcctacagtggtagtaaatagtgggtgcaatgggagtagaatggaagggaggaatccattccacagtgagagaaaggagatgttctatctagttgagtattaacgcatattgtccctgaggctacatgcaaatccaaagtagagggtattccttttgataggaacttagcaaagaatgtttataattgcttggtccctgatctcacctagcaagagtcacaagatgcattcagtgatgaaaaatcagtttctcccttctacttagccattctgataagatgaatatctcgggccgggcgcggtggctcacgcctgtgatcccagcactttgggaggccaaggtgggtggatcacctgaggtcaggagttcaagaccagcctgaccaacatggtgaaaccccgtctctactgaaaaatacaaaagttagctgggcatggtgacaggcacctgtaatcccagctacttgggaggctgaggcaggagaattgcttgaacccaggaggcggaggttgcagtgagccgagatcgcgccattgcgctccagcctgggtgacggagcaagactctgtatccaaaaaaaaaaaaaaagatgaatatctccctttccagtttcgtgtgtagtctccttaccgcccttctgttcagaaaagggatttcttacgtatgtataatgaatataaatataggttttagagagcactaatgttttaatgagatagaaataggcagacgagagagaataattgaaggattagtcaacatgagggcaatttgatagggaaagaaaaagtctgagcaggaaatgtctgtggaaaaaaaaaatcgaagaggaatggaatgaaatgagctcatttatggtgtgagttagggacagaagggatttattctcaggaggtgaaaagtgaaggagttcatgttatagaattcgacctagaccagctatcaagggaaagaaagtaattcaaaagacttggtccaggagatctggagcagatacatctattagaggaagattcagttttgaactgcatcttcagttattcctggaacccaacacaaaagctcatgacaaccttgttatcttcaggcaaaaaaaaaaaaaaaaaaaaaaaaaaggcgggggcagcaaggcttatgtcttaaacaagacagcacataacttcaggtcagagaattccattaacatgaatcacccacaccaatttaaataggaaaaaaaatagtaagcttggttatgtaaaaatttagtttaaaaatcagaaccaacaattgaaattaaacaagaatgttttatttatttctaaaaatatttagctatttattttgaattctgaagcaatactaatatagtatataatgataaaacacagttgattttcatagtaaacatcagcatcagaatgccaagaggaagatttgtctccgttcatgttttattactctgagaaccgcgtaacattttttaaagagtcagaaaatggctagaaaaagaggaagaaagattatttccttaactagttccctggtcccatgctttggtggttaacagtcagtttaactctagaaccatggaaagtctctgtcactttcctggttaccctgggattcctcacattggcagtaagttcgtgaatgagataaatatcctgataactagctacattaatgatgaaaataattataaacgtaggagttggaatttttaaaaagtatcgagcgctctgtgctcttaacacagaggaagcattttgcatagattaacccgtttaatcctcacaccaacctttaaaataaggactgttattgtctccatttcacagaagagaaaactgagactagaacaatttactaacatattcaagttcatacttgtaactattatggattatcagccttagaaaaggggttccagacaccagtgaatagcaacccacacgtctcaactgcacagaccaaagaggatgataatccccattaatctttgcatgttagtagaggcagtggctagtaacaaatgggagagactttggctggaggatattttttattctttaatctttatgatactgtttcccctctccccttctctctctactcctctctctgtcagctgtatccacaataatgccacaatataactactatacaagaatataaagcttctgttctcatgcttatgggtctacaggtcaactgtaattcgggtgatctggataaaacttgactggaaagctctacttcatactgaagcatgcctgggttcgcctctaggctgtgagttcagtttagatggtttctaaatgtgttgggttgtgagccccagactaaaggatcagaagcaacctggggcatgttctcatggcagattgccagtgtgacaagcctctgttcacatcatatctgctaaagcaagtcacatggtcaagcaagccaaggtcaaggagctaggaagcacactgcgctcaccatgaggccatggctaaggtatacatgtttagttctttcacaactgagtgaaaaatgggccccaaattcaatctctcctatactctttttgcgttaattgctagttctttctcactcttctcgctttctaatggatgtacatcccatctatgatcatttggtttttaatatctgagttgctccctactgtctcaggtttcaaattttactttccttgaaatttccctggtgcctaatacaatacctttcacacagagagcgttcagcaaatggtgtggactgcctgtcgtcttttaaaagtacatctgcagagacagtaaaggcacctggcgatattgcattgacttgttagtaacctgacttaacccagatggcccaaagactgtaaccaccattacctggaggaaagttccctggtaatgcagtcagccaattatgttcgaatttactcgaaaattccttgagcataaattattcatggctctatttatgtaggtatctatcttcctatatctgaccttaggaagcttgattgctttcttactcttctaataatcaccgtgatgtttttgaagttttctataagtcggttagaagcagcttttttttctttttttttttcatgagtaatgccgcccaactttggctattagactttgtgtgactgtgcagccatcagcactggatattagatatagttttatctctgcaactcagtcaccttgccaagaattttagtatgaactcttgacttcccagatcaaatgtgagcctgatactctaaatgacttggcaatctactgacaaatcccatggtgtggtattctgttcaccatgtgcaatggtctcagagctcagcattatctgtctgacagctcatataatatttacaggttgttattcgttaggaattttagttagccataaagattttcacagctatggcagacattagaggtctcattcatcactcttgtgaccttcctctctggaatgtagcccatctgtctctgctgttgaaatctttatggaaagtctgcccatctttgaaagtttagtaagtgatcttaaagttttcattgaatctttacttttgatatacgatatagacatataaagcactatccttattttaatttaacgttttgaaaagtgttaaatttaacttggcctttcatttaaatgacagaaaacttactcttgctacaggaactatatgcgtcacatcaaaagaaaatagaaatcatacagaaaaaaattggaatgggaaaaattacacatatatacatatatattcaacactaataactacatgaaagcttaaatactgtattataatcctgattatgactttaggaaatgaaaacgatagaaatacattttgcatataatttaacgttataaagaaaccctaagcaaattcagtaatgaagtgaactgaataggctgggttacagagcacaagagagggatgaccaacaatcagatgttgcccctttccatttctgttttcctctttttatacacaacttctcaaatgcttgcttcccctccgtctactccctccttcagcctctgatcactagtgtgaaattgcccttttgaggtcaccagtgatcgtgggatcaaatacatcttcttcttctacacccttagtctgtcaggctcaagaattgcttatacttcaccagctaggctgttcttgtgtttcatcccactttattctagcttctgtattatttttctttgacagcagttctactgccaccgccatttgggggcatttgccagggtacattcccttttgttttcctccactgtactcatctttttttttttttgtacttttatagctttcttggggtataattatatgcaaaaatatgcatatttaatatatgtaatttggtaagtttggacatatgtatacacccaagatactattgccacagtcaaactaaagataacgaacatattcattacctacaaaagttttgtgtccctttgcttttgtgtgtgtctgtgcatggcaagaacacaacatgagatggaccctcttttttttttttttttttttttttttttttgagatggaatcttgctctgtcgccaggctggagtgcagtggcacgatctcagctgactgcaacctccacctcccaggttcaagcgattctcctgcctcagcctcccgagtagctgggactataggtgcgcgccacctcgcccagctaatttttgtatttttagtagagatggggtttcaccacatcggccaggatggtctcgatctcttgacctcgtgatctgctcaccttggcctcccaaagtgctgggattacaggggtgagccaccgcgcccggccgaggtggaccctcttaatccccttaagttttaagtgcactacacagtattgttaactataggcactatgttgtacagcagatctctagaacttactcatcttgcataagtgaaactttatactcattgaataacaatttctcgtttcccctgccctgtcttctggcaaccacttttctatttactgcttctatgaggttgactatttcagacacttcataaaagtggagtcatacagcatttatccttctatgactggcttatttcactgagcatgtctgcaaggcccatccacattgtcaccaatggtaggaaccttcttttttttaatgctgaatggtattccattgtatgaaaatgtggtgtatacatgcagttctctttgtacgatcttccttccttaaagagtccagccattctcatagcatctgctatgattctagtacttatggtcttgtcctttcacttgcatttcagtgaaaagaaccaaacttatgctgatgcaaatacctgtacacaaatgttgataccagctttattcatgattgccaaatgctaatcagtctatgggcctctgattttcactgcataaaatatagactaatctgtttatcattcatgctgatgaatggtggataaatggtctagctaagaatgaaagatctgttgtatagatgtcattggtctaggaagacagagatgtagaaagaagtaccataagcccaggcagttagatactattcaaaggcatttctctctgccatactttatactacatgtggcacattaacagtagttaggagtggattcaaggctgcagataaatgctgcccaggtgagagagaaagaattggttccacaattaaccatcattcagacaacacatcatagctatgtgattacaaacattatttgtgtggtgattaacattttacaaagcaatttcatattgatttcctcattttatcctgacaacattttggtgagggagatatcattattcccattggaatataaggaaaataaggcttaggcaggaaaaagactagcttaagatcatgaagtgataggggagtcaggactcaaatccagttcttctgaatctgtactctggacattttctgctatatccagctccctctcaagatgctggattgggctttgaaatagaaagccaacatcctgagtgcctttctaaactctgagttttacagtctatcaggggaagaggagagtgtgagaggaatgttcccaaataatctactgtatcaagcagtatatctaacttgctttgagaattatgccaactaaatactattgacctgcagaaaattgatttttctctttacacttatatcaataaagagaggcttctgctgccataagtgtaatttatgtaaaatgtttttaaaacattcatagcctttaatcaagtaaatatacttctaggaattttgctttaaaaaagtaactaaaatatgtgcaaagatttatctacaaagatgttcactgtggccttacttagaacagtgaaaaactggagacaacttatatgttcccaaagagggaatttattcaataaatcatggtacatccataagtgggaattttttagcaatgaaaaatctgttgtaaccctacaagcccactcttaagcattcatcttagagaaatgaaaacttatgcttatgcaaacacctgtacacaaatgttgataccagctttattcatgattgccaaatgctaaaagcaacctaatgtctttgaacaggtgaatggataactaagctgtagtacacccatataatggcatactacttagcaatgaaaagaaacaaatcgttgatacagcaatatggattatgcattatgctgagtgaaataaaccagtatcaaaaggttacatactgtatttatatgacattctggaaaagacaaaacaagtctagtagatcctccctaatgccttttgttcaaccccagaggtgagttttctattttacctccagtgattgctgtatcggttatttatctaaactgtccccacttttttgacccacctatgttatcaaactccaaatccaccaagtatgagaaaagtagagagatgaatgaaggtatttgtgttggaattccagaaagtgctcttttggcatgtcttaaaataacattagcattctttttaattttctggttaggcccctatgttgattaaaatatgacttaacaccagggtgcatcacttggaacattctgttcatcatgcatttaaaaacggctgaaataacaacttcccctaaataatgtggcctgtgcttgtgattttcaaaactaccttgggcacaatattgaatcctgtcacctcaaggaaggaaaagcatttgaagatagaattgctaccctttcttgctcttaataacatactgtgtctgtaacacaaaaggaaattcagaggttggttttgcaataaataaatgcatgtgtagtttgctatctaaattcagtggacaataccccatgatgctggtgccgtatgataatggttgatttgtacattcaagaatctgaatcacaaagctgccctggaattacacgtagtggttataagcacatctgtataagaaaataccaaaggacaacccggtgtcatatagaaactatttgccgataaatttgcttttgatgggctactaaaaatggacacatcaggcataaaagatgtgtgtgtctattacgtaggctagctttatgaagaatgacaagcttccactggtacactgagataagaaacagctgttgttggcatcagtactgctacaagaaatgaaaaaattctgtggcacacttgtgagcactgccacatatttgatcaacttttgaatagatggaagaccagaatcatctggcagccccaaatgaaattgtcgacaacccttaagaatctcttgagaaggagcactgaacccaattccgtagaactatcatccaattgtgtgttatttctaaagcaagtagttccagtgtgtgtgtatgtgattatgatggggcagggaaggaatgaggggaggctgttgttattttcctttttttttttttttttattgtgtcaaggacatttttgagcataaaattgtaaggtttcaaacaatgactgcaaagcagttgcttaggtgaatttataaactgtgaatcaaaggggaaaaacatctttcagaaaaaaaatacactgaatctcaccattggacctatttgatggctacacataagacaaaaagcttttttaaggaaaataaatgaacacttaagaactgcaattacaaaagcttgaaatttcatattgatctagaatttataatatttttaaaattctttaaaaatattttcagctatttagttcaagcatattctgataacttctctgacatttaattgaaaattttccccttttaatgtaaacataaaaagtcaactctagataccctacgtaggtcttcccattagctcagccaggcaacgccaattttcctctgtctctcgctgcttagaggttgtttctttcaggccgaaagcccctaagccaggccaggcagccagcagccctctccagcacacttctttctgagagacgcctaagaatagtgtaggaaatccaaagtgattcttctgctatcagaggatggtctagcatcctccaaattagaaagaatttctggaccactagaatgataaaaaaaaaaaaaaactagaaaggtataataagagaaattgtgaggcctcagcccatagatacctttaaggaaagaatagccattcttttctcagtttaggtattcacaggcttggcattcacagccagtgagggctggaccaagagctctctggagttctcttcttccttttatgatgctggtattttaagaagaaggtacactgagcagccaggagctataatttctggctctccaccatgtttcctgctatagagggctagctttttaatatttccataacaacagactctgaccagataggtcaggaagtctagcccatggtttgtttgtttgtttgtttgtttttcagttggagttttgctcttgtcgcccaggctggagtgcagtggtgcgatttcagctcactgcatcctttgcctcctgggttcaagtgattttcctgcctcagtctcccgagtagctgggattacaggcacctgccaccatgcccggctttttttttttttttttttttggtatttttagtagagatagcgtttcctcatgttggccaggctggtcttgaactcctgaactcagatgatctgcctgcctcagcctcccaaagtgttgggattacaggcgtgagccaccacgcctggccttagcccatgtttttaaatcagatcttatttactctgtgaacttatttggacaggagagctgcatcctacagaagaaaaaaggacaagagaagagttgggaagagaatgagaaaggcaaagatggaaagggaagcagggaaggcaggaggaagggaaaagaaaggaatagagaaagaaggacagaaagaaatggaaagtcagagactacttcaaaacagcagctaaatgtcttttttctctgtattaaaaatttccgtctgccaaaatgaaaaagcataattaccggccaaatacaaatccatttcctatatcgtttaaatgacatatctccaaggtacaaaacagcatgtctggttaaaggttgggtgatttgatccctctattactctatataaaacaaagaagctggagtttcattacgcttaaattgtctggcagtgggtgaagttaacttttattagaagctgttctttcatattatacagtgtagtcgaggatatattagctttgacgttttcttacatctcaatacactgcggagtgaatttactgtgagactaatttaaaagggagtttttcataggaggaaataatggtcagcatcagctgtgcttcaaattattagcagaatgaaaattcaggggaaaaagtatagacacataaagttgctagatattaataagaatgcgtcttttatttctgtttctgataatattctgtgtttcttaaagctccagtgtcttaaaactatattcaggaggaagattatattgttgaggaaatgttatagtgcctcctcaacaagattattttgtcttaaagaaagaaaaaaaaccatcagatcaaacagtatataaaatatatttgtagaggttcagctttagggaagaaatcctacaacttaagcctgaaaaaaaaaaaaacaatgcaaagatcattcatttgaccaatacacagtgaagtcataataaaacaaattcctagtatgtgaaatgaaatttcacgtataggattcatcactcataacaaaagtcttattacgctctgatatcagtagacattccctcacttttggtcaccttttctaataagatcacactggtcagctgacattttgaggcaccaaattaagcatctatttggtaagtgaatttggattctctttaaaccaataaagataaaaacaaccatatcagagtgataagcatattactttagcttcaataacttagaatgtaaatatatcacagagggatatttcagctactgaaataataaaatccagtcagtcaaatagtaaaaaatattgagaaccagcaacaggaagtattataaaaaaaagcactcaagggagacacatacaagaaaccccgtcagtctactcattcagtttcttatctgttctataggtttagcagtggaaatgtttgtgggttttttttttcttcgcatttatctttgtgcctgaatgagttcagtttcgcttagattaggacagaaatttcagaacagcaggttaatccatcctgtcttcatgggcagctgagcaaacagaccaatatcagtgtaaaattgtaattctggagattaatgttgtctttcctgtttgcgatgaatttgacctccttgcctttctttttttcctcccttcttttcagcgtctgtccagggtccctgggagagagccatctcgccaaacaaagtgccctactatatcaagtaagttggaagtatcacatttttaaaagagcatttattgtgactaacctgtatattcacaagtgagtttatttttaaaatgcgacattagcctggcctacaatacctgtgtcttttttttcctgaggaagcttggataaaaaacttattctaaaattaccattgtaaatttgctgatgcaatggggaacgacttttaagaaaagtttatttaatgcaggatatatggtgtgttttgtgacagagggggcggatttttcacaatagaaccaaaagctccagataattttattgatagtgggagtcaatctttgcgagaacaatttcttttatttaggggttttctcacatttcttcttccgtcaaagatagaagatttccgcagttatatgtacacaactgttttgggtgaatgaatactacatgtttccaaaaggcagaaagcagcagtcctcgactcgtagggcttagttgttcattcttgatacataacactcagtatttgtcacctaacaacagaaagatactgttttctggaaacatttgtgccagtcaaaagaatacgagtgcttggaagcaccttctgtagtattttgcatgaaatataaatgacaatacattgggtcaacgtggaagagagaggagagaggatattgagtgattacgataccttcacagtctctcatccattgtgcactagagtctaacttaaatttaactttgaattggaaacctcaacaacaattacaatttactgggttcataaaatagtcctcgataccaaccgaagtctttgaacttgcttctgccatgagtctgactaaaaatattagatgttttcccatttttttccgcctgccatcttttatcgaatctgtttttattctttcactgtccatcaattcttcttaattcggttctaaagcaataacagcagtcctagatcttcattactacagtcctcaagaaatttgattttatgcctctattttgttaactcagaaaaatgggagtgaaggtagtcttttgactctttcaggagaaatacatactttaggaaacggtttaccatttgtcttattacatttttccagatgaggtatctcttaacttgaaaattcttttttagtatgtttgattctgctttttagttttcatattttatgaatttaattttattattgttatatttaattcattagtcactcaaaactgtacattttaaatacctatttaaatcacatgctttattaaataatatattgctgtagacatgcactgtatattaccttacatccactgtatattttatggaacaattttcttcaaactctagacagtgatttcctacatcagtgtctttgtcctcacaaatttttatttccgactaagatgtttgagacctgctacttcttcaaccaattcataaagctctcacttttatccaattcctttatgagctgaaataaagactctttttctcctttcatagatgaggttttaggatcactggagaattcaagacacctttaagctattattctccaaatgactacttgtttggggctcactagaggtctcacatggattgctagggtctccccggtcccattgtcctttccctatatattcatcttctccctgatgttacttctactacaagagatcccagtacattgctgtgagggaatggaaatgaactccgtccaaaaaataataaagagacaaattccagaaaagctgtaattcccttctgtgtattagtctcttgctgtttctcagtggaattagagagcagctacatatcctatttgtccaatgctccttcatgtacctaaagaccatggtgatggtattgataagggcacagatctatgaataagaaaacttcaattttagtcctccagtctagtcttagaggctctgtcattaggcgactgtatggctttaggcaagtcacttaacctataaaaatcttggtttctttctttttttttttttttttttttttttttgagatggagtttcactctgttgcccaggctggagtgcagtggcccgatctcggctcactgcaacccctgcctcccgggttcaagcaattctttcgtcttagctcccgagtagctgagactacaggcacctgccaccatgcttggctaatttttgtatttttagtagagacgaggtttcaccatattggtcaggctcgtctcgaactcctgacctcaggtgatccacccgcctcggcctcccaaagtgctgggattacaggcttgagccaccatgcccagccaaaccttggtttctaatttataaaataaagagttggactagatgatatctaagatcctttttagctctaagacgtaatgagcatgactcattcagttgtcctgtccaaacttaaaaaccgaagatctcagcttttgttcgataatatctttatttttaaaattcattattttaatgaacataatgtaaattcttactttaaaaaacaggaattttatttttccactgtttaattagctttagatatgccctatcaacccactccaatttcaccacacacctctttaaagagctcaaatcttggtatataatttaggattattatgcttcctggctcatgataagagagagagaacaataggcaggaaaatttgccaaaaggtgagtatggagaccttaaaagcctctgaaataatcagttccttgaaatgaggaaattacgtaatttctcaaaaatatctctgaaaccttatggagagcaattctctctacaattataatctctttgaaattagggatggtataatttctcaaatatgagtgtaaaatgttaaactgtaatatagggaaaacatacatgtttataaaatgaacattgtcagtaagcagatgattaatggcacttgtgtcttattagccattactattatctaaaatgttctatggaaaccaaattaatttgatgtacaaggttcggtggactttatgcacagcttaatgccgttcataatctgagatgccgtcttggtctaaaaagaacaaaaatacgtttacagtgacagtgcttcaaccagtcctcatttttcctcttttttatcttgtttgtcttgacttccagtcaagagtttttaccacagatgcccagctgcaaaaccaggtgtcttctctggctatgtttttaatgctttgtaactttttcttttcaatgctgggataaagggatcgcccacataacaagaggtttctataccagtggcacagttcctgttggttgttgaattgtgcactcattcttgagattttaagtcattaacatcttttgctctagtttgcaaatcaggcagtgtttatgcctgcatcctgacatcagcttttcatatgaggctaagaaccttgattttgatacttcaaactacgtgtttgtctagtttatttgtccacagcatacatcattgttacagttttcatattccctctcccttggggctcccttattcctgccagcatctctttcaggttatttgattacagctttcattgccactgaaaaaataatcaccaacaatgttcaacctgttacaactgccttttctactctctgccattttgtagttttttggcctactgtcaaactcatgaaaatttcaatataatagcctttaaccagctgctgcattctgttaggatttctttcacctttttatgttgcatgctcccatatgggtaaaccaaacagagccaagagctgggactctcttgctttcttaatgagttagaaaattgttcttctgtattctggactgtcaaaagaatttaggaatcccaaacatgcatgcaggatgttccagtatagatgtcataataaaagcataagaaatatcacactgggtcagaccaacagggcaactagcccggaactctgtcccagatgaagataccaatggttgttttgtcaggtaacctagtacattttaccttaaaaattcggatacatcatgaccacttcttaataatgcattgtaaatcaactggcagtgagtttatccaatggtgtcaaacttttcctattccccacttcagctttgtcttaataataatatgttccataaatgtaccgacttctatataaatataggcattttaatttctcttgaatctgcatcctttaacctcaaggaatggccttaattaaattctttgaaattcagtaaaaacatttatatttatccagagtcgactttagcctcacattcccctactaatgcttttcattttcatcttcccagtctgagaaattctaatcctttttagtcttttagtctgtccttgacggaaagataagctttccccttgattatcttagttgtttttccctggatcttttccagctctgttatatcttctttgggatgtcgtgactagggtggcccaaatattggttatgaaatttgttagcattgtctctagtttccactcactcatgaagaaagtaaatgttatttgctgtctcccattggtgcagaaatggagagatcaattgaggtcataacctcttctgcatatattagttctagccgaaggttggttttctgctacttttctgtaataccagcaaaagtgtttgaccttatatttctgccagctgtcccttaggaaggatttgatttttagacaagctggtcctttcctccttcaaagacgctgtggttgctaaatattgggaagaattcactaatgaaactcaggagtaaacctgctgactccatcagcagtaatgcatttcatcaggttccctttcgaaatatctctgaagcccttcacagaagagtgaaagatggggttcttgggaacttgctaactgctcagctttttttacatgcaatgctcaagaagcaactcatgtccaaaggagtgtttatcttttcctgctggtaattttgaatgttgtatatacattgctgtatatgttgcctgatgaccttgatcgacccttctcttcactctcaatctcaggcatgtttccacaaccatttattgcatctgagttttgctcacaactttctgctgcttcctgcttagcaaaatgcgatataaaaccttattggatgaagttaacagttgcttcagtcaacatttcttgttactgttgctgtttgtgctgacaaaattgctgatttgggttctgactgtcctgtcttcttatggcctaccattcctatagctctatttgtacgagtatttgactctctgcctggaactgtggccatctgtctagatttaccttttggtatatgtggctctctgtatcctgttggtctacattctggtttgaactcacggatcttggtctggtttttagtaccagtgttcccctaactccagtagcatctgaatcttgacaccaccttcccctgccccctactgtattgcctctattactactttcatggcaattttttcggattccaaatatgtcccatgcttaaagcatatcttgctctcattcttgttctagcccctgttggtaccaggcattgctccaattcaagttttggttggttgatttcttccttcataatattgattgctatttcagtacctgtatttatatacagagggagcagtgcctaactacatcttagccttaacagcaatcaacgtgttaaatatccctgtgttggctggtttgcagtagacacgtcttctgacaatgagatgggctcttattataaagaaactggagtatgatatcaacatagaaaacatttcctcaggccgggtgcggtggctcacgcctgtaatcccagcactttgggaggctgaggcaggcagatcacgaggtcaggagatggagaccatcctggctaacatggtgaaaccccgtctctactaaaaatacaaaaaattagctgggcgtggtggcgggcgcctgtagtcccagctacttgggaggctgaggcaggagaatggcgtaaacccgggaagcggagcatgcagtggacgagatcgcgccactgcactccagcctgggtgacagagcaagactctgcctcaaaaaaaaaaaaaaaaaaaaatttcctcatttcttattccagacacctcactcttctaagaatgatacaagtcttctgacattgggtttgaaaatcagttgaattttgtcataatctttcatacaatgtgaacacatcatgtagtatataattttgtgctatttctggtaagatccttcttatgtatatttttcttcaaaatataccttttagcagctaagacaacattaaataggggaaattttaaataggctaggcatcgcaagacttgaattctagttccagctttactgtcacctagctattaatacttgaccaatgggaaattgcttattttctgtgggcctcagtttctccctctgtcatttaaggaagcagaatgacatgatatcataggtcatttccagtactaacattttctgattttgtgaatgttgacttcgaaatagaaattgtttgtgatcattttccagagaagtgaaaatgaatcttcatattgcccttgaggattcttattgcaccatcaatcttatcgggatagaaaggacaaataatattaaatgtttcacttaactatttagcactattgatgataagaagtggatgcaacagagaatcagctgtctaatttgatctgtcagtctttgaggatgctggtgaatgattcggggtaattaaatttttgaaatcactgccaaaagcctgatgctctgacttttcaaaaggctttagtacacaaagataacccagaggtcaatcttctctgctgtgttttctcctctgccatttgatggtttcaaaggtcacgttacctgagtctcagtaagctctggaaccacaatgaaggaatagttggtaatacattattgatgatataatcatgaaaacaattcaggttaagatattaactgaaagagagtgaaaggggtgccatagtgttgtgcagagtgctgagtctggttttggttttatagatcttgttgggagatgtagatgttgatatcatctgtgtctcataggttcatgaaaaaaaccctcacatccttttttgtagtttcataagctgatttgtatcaccttgactgaaataacagactccaggaggatagctgttgttatctctttttctagcatagtgcctcacagataacaggtacttggtaaatattggaatgaattcatgaacatatgtcagtaattctatgtgcttttcagtttgctgactcatttcaccttcaaaacaatcttgtagtatttgtgtgtcaatttagatttaccactcaaatccatctctcatgccctctagacatgaactttagtgttaggaagcatgccgagtgtttgatagagtttctcatagctcctacagtttggtgcttaagggacagtccttggcatggatgtatgaatggtacataccaaaacatgagttctagattccgttctatcttaatctaacaatatgataaggagtataacttagctcaacctcaatgagaaggttgaactagataatgcctgggaccactctcagctctagctttgtttcagtagaactagagtctgtttttcctaaatatcattcatgaggcttcttctggttttctagtggtcaatagagctttaaattgatcaactactgtttttcactgagcattgtggacaggacctactttttgggccaggatatagtagccactgagtcttaacagaatgtcatcaatgatacatttttattttacagaaaaatgttgtaacattctatatggcatatgtcatgtggaaaggtggcaacatatatacatacacctatacatgtggcagctaaaatttaatgtgtgtatggggaaaataatcctgtattataatacacatggtatagcattccctgcctcattcgtggcacttttggaaatgtgagaatgagcatagaacatattcaagttggtttatccaaaagaagaggagtaaattatttcagctatttccccattttctttttctaactttcttaaacatgcactttcttacataatcacgtgttagaaaaaaaccagtagtcacatcaaataaatctgcatttgaaacaactgtatcatatcccaactctgttcgtttgagccatttgcttaacgtgacacccattctactttatgacacataaggaatattgcttaagaaatgttaattggctttccttttctcctctgaaactggattgaagtcttattgacctctattagatactgagtgttcaggtttttaggaaaacactcatagagatatagccccagtgtgagctgcatttttagaatattttctagaacccaaatatgtccctaatcaaagttagtttattttcattcttagcgttcccacgtaatttggggtatgtgtgaattcccaaacattcccgggcctctcctaggcttctctaattgcttcttattctgttcccctgggaagcagcatcctgttcccttcacaaaggtcagcagcaacagcccaggcaatgttttaaaataacttaataaccctgaactgcctctctcttctttgggataatttccttagagcattagtcctttgaacactgacctggttgcagaaaatgcccctttctcagtgggaaaactccaaatcccattcagtcttcccctccttccttccaggggatagggtgggggagtagggggtagggagagggtattaaatactttcttcaggaaaaatgttaacacggtaaaacactctctctctctctctctctctctctctctctctctctgtgtatgtattcttttttaaagaaatagactgtgagtgcattgtataaatcagtgctgtcacgttgcaaattttttaaaccgttgtacaagatagaaaaacagtatctctggatattgactctggaaagcttctaagagcaggtcctagatgagacttagctcactgtcggcattcggcaaatgatcacgttttctgtgataccattaactcctggggggatgaaactgaaaagcctcgctgctcttcctgaaactctcaactgcttttttctgtttttctttctcagcttatccacatccatcttggtccccaaagccattgcatgtcagatggtcagtgcaatgtgtaatttttaacttgcttctttgttgctttagaaggaatcgttttgttgttttctttccttttggtcactatttcttgttcatgagttttctgtaaacagtgtgtctcatagataagtccatgtaatctgctagacaggaagaaaagcaaagtttaatgtgtgcctactatgtgctaaatgacaaagtgtttcatctgtatcttcccatttaatccttgtaacactccacttattatccaataaagaaaaaaacggctatcagtcgggcgtggtggctcatgcctgtaatcccagcactttggcaggccaaggtgggtggatcacttgagctcagcagttcaagaccagcctgggcaacatggcgaaaccccatctctaccaaagatacaaaacagtagctgaatgtagtggcatgcacctgtggtcccagctactcaggaggctggggcaggggaatcccttgaaccagggaggcggaggttgcagtgagccgagatcacaccactgcactccagcctgggtgacagagtgagaccccatctcaaaataaataaataaataaaagttaaaaaaaaaaaaaaggaagaaacagctgagattcaaaaaagttggaggcttatccaagtcattctaataaaggggaggggggagaattgatacttaaaatcatcatgataagaaggatagacattggagattcagaagggcagaatgctgggtgaggggtggataatgagacattacttaatgggtacaaggtgcactactttggtgatggatacactaaaagcccaggttcaccactatgcaatacatccctgtaacaaaactgcacttgtacctcagaaatttatacgaataaaaataaataaatcaaataaaataatcatcatcatctcagctattgcttctagctgtttcaactttctaatgtttttgattgaaaactggccatttgtataaccaaatgtggccaatccaccactgtgaggctgccatcttgggcatcaccaaaactactctagtagtccttccctgcactgttaggtggattttccttggcgtatcttcgcaatcaagttgcagagacctaagttactctttgctgctttgggcaataaaggggaacaaaaaacaaaatgaaacaaaaacttggccagccctgatgtaagcactcttctacctccctgcaggctgagaaaacaaagtatttcttttttttttttttaatttttaaaatgtttgattctggtctaaatcaattaaaatgagatctccccccttcttttttctttttttcttctaaaaaaaaaaaacacaccaaaaaaccgagatacatgtgcagaacgtgcaggtttgttacataggtatatgtatgccatggtggtctgctgcacctaatgacccatcgtctaagttccctcccttcaacccccaaaccccaacaggccctggtgtgcattgtttccctctctgtgtccatgtgttcttaatgttcaactctcacttgtgagtgagaacatgcagcgtttggttttctgttcctgtgttagtttgctgaggatgatggcttccagtttcatgtccctgcaaaggacgtgatctcattcctttttatggctgcgtagtattccatggtttatatgtaccacattttctttatccagtctatcattgatgggcatttgggttggttccatgtctttgctattgtaaatagtgctgcaataaacatacatatgcatgtgtctttatagtagaatgatttatattcctttgggtgtatacccagtaatgggatggctgggccaaatggtatttctggttctagatccttgaggaattgccatactgttttccacaatggttgaactaatttacattcccatcaacagttcaaaagcgttcccatttctccacagcctagccagcatctgttgtttcctgactttttaataatcaccattctgactggtgtgagatggtatctcattgtggttttcatttgcatttctctgatgatcagtgatgttgagctttttttcatatgtttgttggccatgtaaatgtcttcttttgagaagtgtctgttcatatcctttgcccactttttgatagggttgtttgtctttttcttgtgaatatgtttaagttccttgtaaattctggatattagacctttgtcagatgggtagattgaaaaaatgttttcccattctgtaggttgcctattcactttgatgatagtttcttttgctgtgcagaagctctttagtttaattagattccatttctcaattttgtcttttgttgcagttgcttttggcgtttttgtcatgaagtctttgcccatgcctatgtcttaaatggtattgcctaggtttccttctagggtttttaggatttggggttttacatttaagtctttaatccatcttgagttaatttttgtgtaagctgtaagggaggggtccagtttctgttttctgcatatggctagagagttttcccagcaccgtttactgaataggagatcctttccccattgcttgtttttgtcaggtttatcaaagatcagatgtttgtagatgtgtggtattatttctgaggtctttcatggataggaagaatcaatatcgtgaaaatggttatactgcccaaagtaatttatagattcaatgctattcccatcaaactaccatgaccttcttcacagaattaaaaaaaaaactgttttaaatttcatgtggaatcaaagaagaccccgtatagccaagacaattctaagcaaaaagaacaaagctagaggcatcacaccacctgaattcaaactatactacaaggctacagtaaccaaaacagcatggtactggtaccaaaacagacatatagaccaatggagcagaaaagcaaaggatttctaagtcatattccaccacctccatcagggcttccctaagatagagagtatggccaagaccatacttaataaatgtcatggaatgtgtttctcttcataccctcaattgtaagtctttctgaaaggtagcgcgtggtcaatttagatggacaagaagtgctctgcaggagcctttgcaacatttgtgcatgtccttgattttgacaccaccccccgccccccattccagaacagatcgtctcatccttcccttaagccagaggcctatggttctagctttactaggcaaatatatatggtctgtggctataagtcacaatttctcccaagccttgagctgggggaatactgagtctgcccatgtattacatgcagaacatttcatcttattgcagaatgatactttattcttattgcagaatgatattcattattgcagagtgatattctttagtctttattttttatcattataactacatggtgcaaaagaagtatttctcatactttttctcataatgactcaaaattacaaaagcaatctgggcaattaatatgtttttgaagataaataatggcttatgttttctgaagattaagaaaaatctctgtctgaatatagctgggcacagtgtctcaagcgtgtaatcccagcactttggggggtcaaagcagaaggaacacttaagcccaggagttcgaagccagcctgagcaacaaaatgatacctggtctctacaaaaaaaaaaaaaaaaaaatccttggcatggtggcatgtgcttgtggtcccaggcacacaggatgctgaggcaggaggattgcttgagcccagggggccgaaagttgaggctatagtgaaccgtgtttgtgccactgcactccagcttgggcaacacagcaagactctgtctctaggaataaaaaaaaaagaagaaagaaaagaaaaatctctatccgaaaaatgtaggcaccctgtgttaatatgtaaatacaagtgctttatcaaataaaggctagattaattgttttttctcgctcttacttatatcaatactacaagaacttttctgccaaaaaaaaaaatcaaataatagaaaagaatgaatcctagatagagcaggaggggctgagcaggcacagcaaaagttcaaggtggaaatatctttatgcatccaattaaaagtaatttgtgtacattttactcatatatctatatgtacacatacatacatacacagacacacacacatatatatatatatatatatggagagagagagagagagagagagagagaggacaacgaagaggaaactaaagagaataaagggtattaacagcaggtctgtgacttattccctgggggatgtgaagggaataaatgaccttaatagaccacttcataaacatgttaatgacctcccagaccttcttgtttatcttgttaatagtggttaactagaggaaagatacctgcaaatccctatctataaaatgattttagtagggtatacctggcctggctagatagcttattgtaaataaacctggaatgtttggatttatgagtcgtggctggctggagaatagggcatagctacatgaacgtttttctatttttgtaattgacagattataaaatggaaaacttttgagactgaaatgatttcctttcaatgtttctgtgtaaatttttaaaaacgtatctgttaatatgaaaccaaagcacatcataatgggaaataacatggatgttttggaaacgcatgtgtgattatttcaggttccccagggaaataatgttctatctgtgcccagcacttccctataattctttcagtcattaataaagattggtactagataagaatctgagatttgtgtgagtctgatgtgagatccaaatgttatacttacacaatttgtgtttattttagtttaaaaattatctttgccatgagcaagaggggaaaaaaaggaggatgagcgggcctacatatttttccttaacatcttgtcccaagttttaggaaatcacaagtctaagaaaaggccagggtcaggactaggaagtgatataacagttatacatgtctacctttaaaattatataagtaataattaatttttaaccttattttaagcagatcctagaaatagcaagagcctctataacgtcccagctaagaccccaagttttctttcttgtttaactcttgaaatattttgttaattttcagatcccttgtctcctcagttcagctgtaaactctctgacaacgcttgtgccttatgcatctttgcatcatccctagcatgtattatatatctcacatgtaaaaataataataaatacttgatcatttgttttgattttgatgattaagcactggaagctgagctatgatcccaataggtatgcttatttaaagaaaaatagatggcagtccaggcgtggtggctcacacctgtaatcctagcactttgggaggctgaggtgggcaaatcacctgaggtcaggagttcaagaccagcctgtccaagatggtgaaccccgtctctactaaaaatacaaaaattagtctggtgtggtggcagatgcctgtaatccccactactcaggaggctgaggcaggagaatcacttgaaccctggaggcagaggttgcagtgagccgagatcgcaccattgcacttcagccagggcgacagagttgagactccatctccaaagaaaaaaaaaatcacacacaaaaaaatagatggcacggcacagcagcttatgcctgcagtcccaacactttgggaagccgaagcaggaagatcacttgagtccaggagtttgagaccaggctgagcaatatagcaagactccatctagaaataaataaataaataaataatttttaaaaaatagacaataacagataaagaagttccatgttatttttttaaattctagatagccccactggtgttacagtttattaaattacatttggaagcgattttttagcagtccatttattttgtatatttcagtttgttgagagcagatggggttgagtgttgatggggttgattgcctggctagattatgctataaactataaatctttgaaagttactgttttgaagaaagcatctttaagtgaatatattccttcagtagctcctattaccaaaactgttgtgagaatatcttaggaaaacaccttaaaatcctcttctatcaaaactcccaagctttcttcaggagccagcattgttcagtgaatgcatgtaagcctatgtcttaatagagggatccctaacctctggaccatggactggaacagcaggaggtgagtggtgagcaagtgaacattactgcctgagctctgcctcctgtcagatcagtcgtggcattagattatcgtaggtgcacaagccctattgtgaactatgtatgcgagggatctaggttgtgacctctttatgagaaactaatgcctgatgatctgaggtggaacggtttcatctcgaaaccatacccccgcccctgcctcccagtctgtggaaaaattgtcttccagaaaactcatgcctggtgccaaaaaggctggggaccactgtcttaatagatcttgaaaaaagttggagtaaggtaagtggtaaatcctaagacatacattgaggcagagctgcagtggtatccagtagggaagaaaagacttcaagtttagaattcagttatactcaaccagtttttgcctttctctgttaaatattagatatcattaccagacacatacaaaagattttaattgcatgaatgcccgatgttgatacaagagagccgatttttttttcacacatagttttttggggtttttttggtagggagaaacatcatctcatgatatcgttttaaaggtgctttattatcaaggaccttagagctttttctctcactcatatttcatatactcttagtcctcaagccatttctttttactgaaagcactatagagtagcaaaaggcatcattatattgctcagcctcattcatcatcaacaaaattgccaattatattccaagtccttgaatgtattgtttaaaaagatgtataaggtgaaaggaagcagttcaatgttgaggtggaagatgaaacatactgactggtagattcagagcatactaatcttgttttcacttgtgaactggaaaaaattaacatggagggatggagaaaacatgttcaaactacaaagtcattttttctgagaagttatctgactgtaactgtaactgtaactataactcagggtatatcagagggctcaaatgtggaacacttctttaaaattaaaacctaaaagtcctgatgtgtaatagaacgtgtaaaaatagcagcctctgaaggatctgagatgagcagaggaacactgaataatataatctgacagtatgggccatacccttacagtagttgccgtggcctggaaactatagaattaattcagtaaaacatcagaaaaaaagcaacataaatataaaatattttaaattaaaaagactgaataagaacagaaaaaaatcccctagcaaatcaatattgcttggggaagcatgaatcccagaccagcaatattttaatccaaataacttttagttccatcgtgaacacctttatcaccaagttttataaagagtggagtgaagaaaaaaagtacttgaggttgttggaaacacttctcaaagttggtggctttattcagagattcatgcttgactgtaccaacttctgtttaatttatacgtagtactttgtcaatttaggaatttggtttacttgtcctttcctaaatatgtgtattacaaaacaaaaaatagagaaatgataaaataattacaaagatgattaagcaatagtgttggctatagtgaacagattattgccattttatagagtaataatatacctaaggaaatctgtgggaaatttaatttgggatataaaacacagaagtcaggcggagatgaaataataaaccaataggaaattaaatttaggcatgagagtccaaagatgtaaattctatagatgttataaaataatatgtatgcccttacataatttcattactctctgaacttcatttctcagtgaaatatggggaaatgatactgaacagtgcagcagctcttccgcttatgaaccaaccagaagatatataaacaactcttaagggttatacattataaagatataatttagtctggatttttttttaaatttgaaaactaattttatataaaccctaattgggcaattctccattctttgacttgaatattatagtaaatatgttttcccaatttccaagtttcatgtattattttcaaagaaaaaagacaaacttttaaatgtccagctacctgggacttcctctgattatcttttaaggtagttcaaatatatacaatttcaaacaacaacaacaacagcaaaaaatattttgccagacaatatgtcttgtttgtttttaatgttcacaatgtaaagtacacttattgccaaacctcactttcaatggtgttacaaattagccaagtataactagtttgtaaatactaataagaaggttgctgaaattcagccctgaatatttcttttctgcaactccaaagaggaaaatttttgaaatgcaaaccttgacctttatcaaagcctaggtgaagtttgttggaggtgtttggttttttgctggtgctttgttataatgcagtttgaaagtagactagattggcaagacataattggctgctgtgtggagaatgcatttggtggaacacgtgagttaggggtgaggaaatatgaagagccagagtggaagcagggagaccagatagtagtgtgggaagcactggtgttagataagatctagataaaggtagcagtggagatcacaagaggtggttggaatcagggaatatggtttagaaacaatcacaggtcttgctgatgcattggaggtcaggagggacagaaagagggcaatccaggtgtctcctcggctttcagcaggaacaggtacttaaagaggaacaaatttggtagggaaaatcaagttttagtgttccattgcagtacatggtaaccatggctaataataatgtctcatatatttcaaaattgctaaaagaatagatttttaatgttctcaccgcaaaaaataaatgatatgttggtgaggtaatggatacgttaattagcttgatcaactctttctacaatatataccaagatcaaaacatcacatcgtatcccataaatatacaaactattatttgtcaattacaaataaatgaaataaataattttttaaagagatgtcttaaagggtggcttgaagagcttctgtgctccaataatacctgcccattagccatactttgcttccagcaacaacaggaaaacatttaatctaaacaaaaaaaaattgcttgtcaactagatagctactcttccgtgtagaaaccctagagctgcctgggtttagacatgtttaagtttgaggtacttattgggtatctagctgtgcagttcaaaatttggatctgaagctaggggaagacgtcaggacaagagctttaacttttgtaatcatcaatatatacatccttcttagagtcatggggtgggatgccatcatattgggatgagggaggaaaccctgggacttcacaatatcgagctagtttctgttttgcaaaaggcaaatgtattaatgaattcattacattaattaagcaaactatatttattgggggctattgtaccagctattgtaaattttatattttatattatatatatatatatataaaatgctcacaaaataaaggaactaagtcataaatatgcatatgatttacataaaggagctaaaataaggatctctgtttctgtttcaattctttattaaagatctatctaagactataaagacatatataacaaggtacaggaggtaaagagtatattcttaggcatctaaaaatttttcctatgcttttgaaatctgtgtgatttactttcttgaattggcctgtaatataggagtacaatatcattgcagagattaattagtgtgtttgtgaactgttctcaaatgctaaaatgaaagcataaaactataaaatggcatcattattccttaaagaagcatagtttccaagggtgtctctgatcattgtcacagcataaatgaccaatttcacccataattagccaagttagtaagaagttattttttactgggtatattttgtttaacctcagttatatttgtaaaagtagaaactgctacttgttactgctttcagaatttctcacaaatgctaaaatgctttttaattctaatgcacttaaatggtttgattctccttacctaagaaaaacatttatctaaagatatactcttgactgattcattcattgattcatttgtcaatagatgtttatttatcagaatatgtgcaccagatacattgctagatgtaaagggtacatttggtgagcaacatgcatgatacctccaaagtatagccagggaatagataatggaaatgacactaagaatgaatacatattaacacaaaaagagagagagagtcatgtgtcaaggcaatttagcaggagggaacttgtcaatacaagggattaaaaggacagcatgactagggctggaggaggtgaggagaaaactcaaaaagtcctctggctgatgcaaatgaattggatgaggagcctatgaatacaaacgtttgaaggttactgatgaaagccaggtgagagaagatgggatttggaccaagatgatgatagtttggatatggtgagaaaggcatagatttgagagatttttaggaggtaaaaatccttaagatttgaggatagatatcataggaggaagggcgcaaagagaaagcaaaacatgtcaaggaatcacacctagatttctgggcaatgcacagttggtaattctttacagtgagttagggaactctaaagaaagatcagatttagggtggcaatttgattgtaaatgtttggatttcaaatgattggtgacatccaaaaagcactgtaaatagacagatagtgtgcacctaaagaaagaaggaggcgcatctgggttggagtcactaatttacatattacttgtatatagctagtaactgaaaccatgagtgtgaatgagattctgatgctaaattctggaaggtcactttttaaagtgttttgctttttgaagtacaggtgcaatactaaaaataaaaaagactaatttttaaaaattaaattaaaatgaaaagcctggaaagataaacaccaaagttatgatactagttgtagtatgggagagggggcatcagagaggatcggaatttcatcttgaatggtgtattttatttcaaaagaagctttgagcaaagataaaatgttaattctgagcattagaaggaacacatttgtttttttgtactgtggatctttttgtatttcctagaactcttaatctaaatcaaatattgcaaaatatatcactgtaaacaactggttggtcactagctttttaaatactttgtagcaacttggttgcttgtcagaggtcttctttgagtgaagtctttaatttatagttctttatgcttgatcagcataattgcaccaaactgttacttaatctgaaaaatagctgtttcctagagccctacttaatactgaaaacctactgtgtttgtattgcaattgcatttttttttttacttttccccctgcttttcagtttgtataatttctgttaccctatattcaagttcactggttctttccttgtctttgttgaatctacagatgagcccatctaaggtatttttcttttctgttactgcttttaatttctagcatttccatttgattcacttatagtttccagctctatactgaaatatactgaaatatagagctggaaactataagagtgaatcaaatctaatcttgcatattgtcttctaatcttacatattttctatctaatcttgcatattgtctttcttttccctcaagagtctttaaaatattaattatggttattttaaatttcctgtctgatagttccaacaactgttacatatctaagtctggttctgattcttgctttgtctccttagactgtgatttttcttgcttaggcatgctttgtatctcaggggtaaaagtcaggcatcttagatagcgtaatagatactgaggtaaataaacctttgacatggtaatttatcttaatctgactgggaattgggctgtgtttgatgttggtagttgctttggttgtcattgttgagttttgttgctgctgtggccaccagagacttcaaattcctctggtaactttgtttcctcattggaagcttgttagtgtagtggttgagtgtcgggcagaggcattctctaatgtttgaattaatacacagttggcctgggtcttggggatgtggtctttacaattatttctttcccttcctccagaggtagagtaacttcaacctcccattcccttcctggagctgcagtggatatccaccagtgttctcagtctatggccccaaggccctttctcctgcataaggctgaaaaacaacaacaacaacaaacaaacaaaaaaaaacaaacaaaaaaagaacaaaacaaaaccacacatagatgagatctggtgttcccttcccctaaaatgcagtggtatttcctcagtgcctgatatggtttggttctgtgtctccacccaaatgtcatgtcaaattgtaatccccacatgttggaggaggggcctgatgggaggtgaatgaatcatgggggcagatttctccgttgctgtacttgtgatagtgagtgagttctcaagagatctagttatttgagagtatgtaggactttccccttcactgtgtctatcctgctgctgtgtgaagatgtgcttgcttcccctttgccttctgccatgattttaagcttcctgagggctccccagccatgcctcctatacagcctgcagaactgtgagtcaattaaacctctttgctttataaactacccagtcacgggtagttctttatagcaatgtgatgtcttttcctctgaagagaagggtataagcagattcatggtgactagctactgtgacccttccccaatcagcaacacagagggtgttggggaggctttctccagattcttcgcatcctccttgtgaaggcaaggtacagttcctgaaggaagaagcttgcaaaaggttgggactccacctatggcagtagcccccaggatcttcacactctcaggctagctcccacatgtcccccaacaatttaatctccctactagtttatatggcatctgctccagggatccaaatgctcaggcactgcttctggctaaaggccaatctctctccagatttcaggttgttctataatgtcatttctctgatggactgatgaaaagtcattaatttatctgtccagcagttttcttgctacaagtatgggagcaacctctttgcagctctccatctccatctccaagttgaaactggaagtctgagcaatacattttagaaattaatatttgtaagttttccgtgtcataacaaaaataataaatgttcactgtggaaaacatagaaaaagattaaaaatatttaagtgcccatcaccacctagacaactgcaatgaacatgttggtaatgtcttcttccagttttttaaaatctgctgataaaatacaaaagatattgtttatataactttgtatcctaccttttcttgagcaatgcaagtttaaacctaaatacgaagatactctaacttcctactttacatttttgacggcagatgtcagctgtcttcccaagtgcagtacccttggcttaatatcaggtagacaaataaggccaccacaaattcacctttcacctcaataacacaggtaatttgatagttctacagaccctataatattacttgactgaagacccagaatacaagtctttcaaggattactctagaaactatataaagtattggtatcatctcccttcatcatatcttgccaaatccaacaggtttggaacttctgtaggaagatttttgtaacatgaaaaatgcgtgttgcaccttccatatccagcaaatacaccatcggttttttgttggctgcaccaatgacataaaatgatttcactgaatagggggtgacccagaatggaaatgtagagcatcgaaaataaaatcaaccgacgcagtctttgcagcaaaccatgtggaaacaaatttaaatatggaacatactctttccaactcatcttcagatgttgctttaaaatttgtgcaggtgaaaaaaaaatctttattttaaggtaactcaatcttttaccattggagagaatagaattatttttgtttcctcttgtatattcccagttgtttaaatgttctctgtttccttgtgtggacacataaatccaaatatatctaatatcaaggtatttaccatatgcagcactttttcctcagatagttattttttgaaatattcaaatagcttacctgtatcatcccccccatccttttttttttttttttttttttttaagacggagtcttcctctgtcaccaggctggagtgcagtggtgcgatctcggctcactgcaacctccacctcccaggttcaagcgattctcctgcctcagcctcccaagtagctgggactacagttgcatgccaccatacccagctaatttttgtatttttagtagagacagggtttcaccaatttggccaggatggtcttgatctcttgacctcatgatccacccacctcagcgtcccaaagtgctgggattacaggcgtgagccatcacacccagcctaccctattttctaaacgaacaattagttgacttttcttcagttcttactcagaaatatctgaccctaggttccaacttttgttttgctctttgcagttagtttttatgtgtactgttagggagatgtgctttttttttaccttcaaatttaaaagagagagttttcaattccttttaagtcaaaatacaactgttctactctaaagctttctttaaaaaaagaaaagtaccaaatcctcatccgtagtaattaattttgacagtgtaggctcagtagtgattcacaaacctgtattttgtgcatcagcattccttattattctaattaaagtggaacattgtgccctcgctaatcattaatgggttttcattttgtaaatgacatttgcagaagttaaaacagcgagttcatgtgaagtccacaggcaacggtgttgaaattagcatcaccatagcaacagtcttccatcattagcattcagggcaacaggaggtgttttgttgtgttttgtttcccaaaaaaagaaaaagaaaaaaacttcaaaggtaaagcctacagaaactctctcagaagatatttatgttccttgtgtgtatgtgtactgtactagacctctaagtctacatagaattttttttaaaaattgcaatgtggatcatctcctttccagatttgtgttttgcctagtatactagctaaatttcatgatctttctccagctgtacacgtctgacctgctgagcagcatttactcattgccaacctgctgctcaccaatagggtttcctacgtggatgaagagagtctgtattcatgaaaatatttggttcaatctaaaagtattatgtgtattcatgagtttttaatttaattcatggaaaatagatttatgctgttagatcctctggtgaactcatttagtcatgttgtagatataggtcaatgattattctcattcatgtttagacggaattaaagaggagtcaaatagagaacaatattatcttaactgagtctctggcagtggtattaccactattactctgtatgtgtgtgtgtgtatgtgtgtgtgtgtgtgtgtgtatgtgtgtgtgtgtgtgtgtttgaattctaatattctgggaaactttaaaagtggcatatctagcacttatgtttttctcagtactaaaatgcataaaagagcaccatattgacctaccagctgcttctaaatcacaccagtagtaggtaattatgaaattcaaatgaagtttaattttcatttattatacaaaaatgtcatagctcaaacccagaagtgttacccccaagcttggatatagacaggtatgtgtgtacattttacttttcaagatgaatcatagcagtcttctccattacatgtaaggactagaagttgtacattccactcaggtacctaaaggcaagcctgtgctagcccacactaacaaagcaaaatgaagcaaaggatctatctggctttcaatcagggatgcatctatgctatcatcagctctgtcacataataaatgagtctatagataacttgaactactcagccaatgggctgtaacccagtgattctgtggtattgaaaggcagcaacccccagaagccacatgtctcagtgtgcactccaggactgtaggcccatagaacttgtatgtatgcacacatgcatatgcattccccacttttctaatggcgatccaatctaggcctaatccacagctagtccagaaaagaacttttttaggttttctgtctgccatcactttgttgagaggcagtacaagccaagcaggtgtctgtatttataatatgcacaatgttaggataactcaaactcataagggaaagattaatggctgactactatgaaaaccgcttctagccttgtgataccagcacctactatcttcctttttctcttatatgatgaaaagatttcaatgttggcttttcattctgatagaatgtgcaagccaaaatctaaataaagtccagtggcaatgatccccttaaacattatatctttcttctcgatatgctgatgttttcccttataaaaatctatgtaagtttcaagatttatatgacagacaaaccacacaaacaggaggtccctcacattcactactagtcacttgctctatcactctgggaatagcggtcttcagattgcatctctactctacctcttgctcttttcaacccctctcctcttttttagaccatacagggcatcagacaaggtttagtttaccactaaactttgggatttggaagatggtgtataaactgatacaggtagtccactcacagatgtagtatataattacagacttgagttttcaggggctcttctccagtttcctgtcaatcaatttccctggctgagacattagcatttgtcagtgaccatgcttactatatacatacacaattgtgtatacacaattgtaaaattaaatacgggctttagaagagattattttttcttaagagtaggttactctataaatgccaaagcatgtgttatgacatagaaattcaaatgactaagaatagctaattgtttagaaacatcttacttgatgtctattgttccaaaatttgatccaatttagagtggtaccaatccatggtgtagaatataaaagctaaaggataacaaaaatcctaggaatctcatgccagtaagaaagttctaccagtcagatgagatgttgagagcatttatgacttggcatcaggaatattataagtaaaattcatgtgagcagtaattgcagctatgaaccatgttatttgttcccacttgtccaactgtaattctttcacttagctcagagtagttctttgtaacattagggcccactcatctgcctttaggtagggttttaaaagatgcctagaaaatagttctgtgctagaaatcagagactcttgacctactgtaaagggagcagtaagcacgtttcctcaggagaatctttctacatactgcagattcccataaaaatctttgtgacaaaattgcctttactgaaaccatcatccattggattaaaaaatagcttaccattagctttttgaaaatagaaaacgttgagccttttcaatgatactttcaatagtttttcacaactatgagtcctcaagctatcagtcttatttttagataccatacttataagatagttatagaatttatagagtatggtttaaaagactattcaattatagagcaatcattcagtttattcccatggcagaagtaaatggaaaccactccagatcaacaagaatctactctcttctgattcagaaaagagatttcctatcttttcatgaataatccatgttcaatgtttaacacctcaggaagattttcttaatagcttcttctggtcataaatccttggtctgtcatcagggacatattgaagagttagttaccaaagttcttaatgtctcccattgtaaaaaaaaaaaaaaaaaaaagtcactttttggattgtttctttcatagagtccatgcttctgtacgcttaatactttagcttttgacttcaagctttaggtaatgcaaatgaagctattacatcaccaaagttaaatttttcttgtaagtatattctcaacattcacaattgagagctgcctcttctttggctggtataaggttttaatttattgtagcactttcaccctagaatggcaaaaaatgttgaaatcaattccatatatcaccaatacaaagtactaagtcaaggccgggtgtggtggctacgcctgtaatgcaagcactttgggaggccaaggcgggcagatcacttgatgtcaggagttcgagaccagcctgaccaacatggtgaaaccccatctctactaaaaatacaaacattagccaggcgttcatagcgagcgcttgtaatcccagctacttgggaggctgaggcaggagaatcgcttggacttgggaggtggaggttgcagtgagccaagatcatgccattgcactctagcctgggtgacagagcgagtctcaacaaacaaacaaacaaaaatattgaattgtacaccttaaatgggcgaatcgtatggtatgtatactaaatgtcaataaagctgttatatgaaaaaaaaatgctaacacacacattctgaaagtatattaaaagcaaacctacggccgggcgcggtggctcacacctgtaatcccagcactttgtgaggccgaggtgggcggatcacaaggtcgggagatcgagatcatcctggctaacacggtgaaacccagtctctactaaaaatacaaaaaattagccaggtgtggtggtggacgcctgtagtcccagatactcgggaggctgaggcaggagaatggcgtgaacccggggctggagcttgcagtgagccgagatcgcgctactgcactacagcctgggcaacagagtgagactccatctcaaaagaaaaaataaaaataaaaaagcaaacctacaatgtctcttacaaacacaggcaactattcaattccgagtttacactactgaaacacacatgaatatgacactaagagaatcacgtggatctgcactcttcaatcaacactacgtctctgagcacaagaattttacatctgatttccatttggggaaatagattcagaatgccataaaccagatacttcttgccttcctttagtggtcatttctgccattatcatttaagggaatggatctccttctcccaaaactgttaccctaagattacaagcttgtcctttaacttatctctgaaagcacacctctataacgggtcatcagtattcagtcagctaattagactgcagaagtacgtttactcaaatgtgaggagataaaattgtgaaatgtaagaggaagaaagaatgtcaaagataatccaacccaaactcttcatcttacagataggaaaatggaagtccaaaaggggaaagtaattttagtaacatggctaaactggtctagaaaaccagatcttctgatacctgatcccatggtctttctaatgccatggatgttcgggtagaggatatattcaggtagataacttatagatagccccatgtgtttgtatagcactttatcgaacactttcacctctattatcacacttgattcttacaatatcccatggaatgtttgagtatcatatatgattattcttattcccacagacttggaaactgaggctttgagatgtctggatctatcttagatcatttgctatggactagaatctgggactaagttgcttttgtctaagctgtgtgtttgttctgttgtgccgtattgttaattcatttctgttggtaaacaacacaaaggaaaaacttctataattatgtttctttttcatcctcaggtcatctatcctactttttatctaagctttggaaaatattatgtgctttccttttttttgtattttcttttcgtagagatggcagcagggggtagtctcaccatgttgcccaggctgacctcgaactccttggctcaagcgatcctcctgccttggcatcccaaagtgctgggattacaggcgtgagccaccacacctggcctattatgtcctttctttagcttgctcgtttaaccatttgtttggcagggggagtcagaactgtgttttacttagtcgattaactgataggacaatttaatatctaccctgcactggcagtaacccccatagccccgctctgtgtctcattctgtgccctgaacaaccttgtcttaaaaacattttaaaagcagcaagtatggggagatttcttatctccatataatacagaagcaagtgtagagtatggctacggaaaacaaccagcaggtgaggctgtgacataacaattttaacccaagcctcactgccacattgaggtatccttgttcaataaatagatcagaaaatatggtgtagtttttccctaacgctgtctaaacagcaacaacaaaaaatcattacccatagtatttcagtaatgtgttgtattgaatgcattgttttcgagggcgttttcaaaaaataagttgattgaatctcttttttttgcttgaagaatgacccacattcagaaagtatacagatgaaacatgttcagctcaatgcaattatcacaaaatgaatacacctatgttcgccatctaggacagtaaataaaacattatcagtagccctaaaccagattacacacacacacacacacacacacacacacacacacacacactaaaccagactacacacacacacacacacacacacacacaccgggttgggggagtggtgagagagagagagagaaagcgaatattatgttaacagttggggagtctaagtgaatggtttatgggtgttcttttaacatttcaattggtttaaaattttcaaaatgaaaagcttgaggagaaacatagaatataaccactacctcagaaatcaccaccctacctcacccacattccctctcccaatcactattcctccctcatcttaaaggtaactgctactctgccttataacactatggttgagttttgcctgtttatttgaactctataaaaatggaattgtacagtatataaccttttgtatctaggactcaacattgtgtttatgagattaactcatgttgttgcatgaatctgtcatacattttcattgcaatttgatatcccatttaaaatgtatactataatttatccattctattgttggggaacattttggttctttccagtttgaagacattatgaataaggcctcctatgaacattctttaatgcgttttttggcacacacgtgtgtacaactgtgtttggtatatactttgcagtaaaattgcctatgttgagggtaggcatatgctgagctttagtagatactcctggttttccaaagtggttgtaccagtttacaccatcattagcagtatatgaaagttctagtagctccacatctcaacaatacttgatacttgttagtctttaaaattttcgccattgcagtgagtgtgtgagtagaatctcattgttattttaatttgcaattgtctgattacttatgaggttgaatatttttacgtgtatttattgaccattttggatatcctgttgtgtgaagtatctattcagtctcttgcctattttttttattgattcatccttctttttcttattgatctgtaggagttttttttacatattctagtttgtagccctttgtaaattgtatgtgttgcaaatatcttctcccattttatagctttccttttaattaaattgtttttttgattgatagttcttaactttaatatagtccaatatgtaaatttttccttagggttaattcttttgtgtcctctttaagaaatctttcctaatacaagataatgaatgtatcctcttttattatcttctagaaacttactattttttaacttttccatttagatatatagtacacctggaattgaccttttgtgtaatatgtgagatagagattgagttttatttttcataatatggatatctagttggcccagtacttgatgctaaacattcatttagaattcatttgatagtatttcctttagagttattgcatctgtgtttattagttatattggtctgccattcttgtcaaggtttggtatgtggattattctggtttcataaaggcaagtagggaagcattgcctcttctagtctctggaagagtttctttaagattggtatttctgccagtgatatgatttggccttggaattttcctagtgggaaaatttataattacagtgtttatttcttaaatagtacagggctattccaattttctatttcttcttttgtcagtgtcagttgacttaaagcacactaagatactctaagattgctatggtcagcctttgctggtctaaaccagaggttgcaaactgaaatgccaacagaggggctagcctgctactgtaactgggcaaggctagcgaagcgtaagttaatgggagctggtagggactatagaatacatgtgccgttatagaatggtggctccggaaagttattgtcatgcaagaataggagcccagcatggacaaatcattccttttaaatgagaagtcagaaggttggattattctgtaaaatatctctgaatatttaaatgttgagtaattcagattaaaaaaaaaaaaactgtgtgggctaatcaaaacatttgtgcatgccaaatttagcccaaagtctgctagtttgcaacttgtactttcaactaatgaaaagcgtaatagcacagatataattccattttcaaataatataattcatttatagttgacatttatttaatttacacttaaatatgaatttgtcatttaatttaccatattaaaaaagtttagattttaagacatccaagtctgcaaataactagaatattttcatttactctcatgtttgtgtacttatttttccttaaatgttattttcatgatatacttagtgtcttgtggacattccaaaaaactgatttgacttaaattgtcctcactccaagctttaaaattgcttagttcatagcctaccttgcctaaagcaaacctggtagtctcatttcaagttactggattttttgtttgtttgtttgtttgcttttgccttgtttcttttcaaggttatatagagtgaaggaatatcagacttcttttaatttttgcagggaattcagattgctgtggattaagatcctatatataagatgcttaggatagaggcatcatgaatgaaaaattattcatatgaacacactttttagagtattatttttattcattcagcaaataatcatagctgccatactaggcaggtagggaccatgaagactactgtccttgtagtctaaagtcttgtagactaataagatatgtataactgttaaatagtacactgaaaatacaaccttaaacaatcaaaatatttgcaaattgtatttagttgacatgattgcataattgtatttatgtgacaattatatttgttattcacatatttagggagtcaatatgtacttaaggtaatctttgagctattttcaggatgaggtattagctcattactattaatactaccatcaccaaatgcattacctacttatctgcatttccaggaaaaattcaggaaattaggatttttaaaataataaaataatagtaaataagactgggcatggtggctcatgcctgtagtcctagcactttgggaggccgaggcgggtagattgcttgatgccaggagttcaagaccagcctggccaacatggctaaaccccatctctactaaaaatataaaaatcagccaggcatggtggcgtgcacctgtaatcccagctactcgggaggctgaggcatgagaattgcttgaacccaggaggcggaggttgcagtgagcagagatcatgccactgcactccagcctgggcgacagagtgagactctgtctcaaataataataataataataataataataataataataaacagaataataacctaagtgactatatttgatatatagttaagtgatgtttttgtagactttactaaactaaaaaataaattagcagttatttaattttctagtttataaagtacctacttacataaagttgcatatattacttcatttaattttaaaagaatatcgtaaaatatgtaggatagatttccattttatagtcaacaatacttattatttcaatacattatgtgattttttttcccccagtatcacagtgttagagcccaggttcaaaccagcattttctaactgtaagtctggaagtctgtctgcttactctatgtaagatgccttatgaagttcatagaggagacagctcagtggattcaggcctggtcttatattttgctgttcatcttgttttaagtgttatgttaagcaaataaaacataactttaaacattctgtttacttttaaaatttgatttagagctaacaaaaattagaatttgtactccatttacaacgaacagaacaaccaaataagcaaaattgtatttgcgttgtcaattacaataaataattataatggtatatcagagtgttaaattttgatttttttttttttgagatggattttattttattttttattttttttttttttgctctgtcacccaggctggagtgcagtggactgcaacctccacctgctgggttcaagtgattctcccgcctcagcctctcgagtggctgggattacaggcacccgccatcatgcccagctaatttttgtatttttatagagatagagtttcaccatgttggccaggttggtctcaaactcctggccttagatgatccacccgcctcgacctcccaacgtgccaggattacagatgtgagccgccacacctagactaaaattttatgttcttatatttctttaaggaaagcaaaaatgttgacagagagggttaatactagttatatatacaaaaaacctaaaaataagattttggattattctattatatgattattcatttattgaaaatcataaactaattgaatgactgagagcagcactaatgtgattactttggtaggaatctgtcctccaaagttgtcagttgtcagttattcttagcattttgaactgaagtctatgtaattaagtcacctgttgtttctgacaaaatgagcaaacacacataaaatctcttggttcgtcttcatgtctctgtggcagagaactgaccacattattcagttcctttgtcctttttagacaaaagccacctctacatggccctataagtcttcaattcaaggactatagccgttatcttaatgggattgtacttggttatctgataaattgtcgggaacatacccacattgcttcctttacctgacataaaatttagtcagctggggctcaacgattgaccagctttatcttgcacgtagtgaagggaaggactttcttactcctggatgtgcctaaatttaagcctttgaaaaagattgaagataccaattggcctacctgccctaagtagatgcttcccacagacttaactggtgaagtgcttgtctaaggtagacagaattttttctttagagaggagcaaacaaaaacccaaaaatactggcgtgttcttttgatgttctatttcccaattgatttccgggttcacactactccacaacatcttactgtcccattgcatcttaaccctctctcctctcccgcccccactttttttttgtctgtttcttctgcttccaccgttgcttctgctctgaagcaatcattttctctcccttcaaccaagggtggaattggcacacagtcaattggcttgggagactgcttactgatctgtcttttttgaacactggaatcttgacactggttatcattttgaggacagcctggtttggatatttatctattaagaggaatccttaattggtgtctttgactggagtatttgaaggagtctttaattgggaggttttaaggcaccagaaaagattcattaggaatgactgacctcatgttatataaatgagaaatatttaccatttgctgtacacgtaattgaagcatgattatacataaaagcatataattaaaaaatgtaaataaatacctaaataaataaatgcctataactagcatggcaaaggattctgatatcagctttcaatctcttttagtagagactggacaaatcagaaaaagaggatttatacctgtcctcctatagattatgctttcttctcccatcatccagttttaattgaatctcctcattgtgctttctttcaatcttgagctgcacaagttgttttctcctgtcagagcttttaatacacattgacaagaattattagtctctatctgcagttgttccaagtgcaggtttgaaataaggagtcgtcatcaatgtgctaacgcgtgctacttttggtatttatacaaagtgcctgctgccagttacttgccacttagaatgtgtttttcttttcctctcttgcgttgtgggagtagaaggattctctgtttcttttggcagacagagaaattttcagattggggtctaatgaaagaaataggttccattatacagatgtacagatgttctaaggtcacgatacctcctataatattcttatgtgaaacctcctctttatgttcaacctgtgtacgttacacttatacatagcaggcatagtagccatcaatattagttactttaaaacccaggcctcctaggctgtggtttgtactaaaacatcatattcaaataaaagcattccaatacaaagtggagaaacagggacaggcatggtggcttaagcctgtaatcccaacaggctttgggaggccgaggagggcagatcgcttaatcccaggaggtttagaccagcctggccaacatggcgaaacctgtctctactaaaaatacaaaacttagccgggcatggcggcacatgcctgtaatcccagctgtaatcccaggctgagttatgagaatcacttgaacatgggaggcggaggttgcagtgagccgagatcacgccgctgcactccagctttggtaagcctcggtaacagagtgagactctgtctcaaaaaaaagaaagaaaaaacgtgtagaaagaaagagaggatctgattaagctcacaggaacattgcttctcaaattttaatgtgcatacaaattgtctgggaatcttgttaaaatccagattatgagccagtgggtctaaaatgagacatgatgttctgcatttctaacaggtgatgctaatgctgctaatctgtggaccaaccacactttgagaaggaaggaagtagactattatatttactcattcacttgttccatgataactcttaaaacagactggtgactttaatacaattcagagcaccaaataaagattgtcatatgccttatttttaacctatcgtcttatatcaaaattatctgataaacttcccaagtgtgcatatatattgtcattttaaataggtttcaataaaatgaagattcgtgagtaagaatataggaataaatgacattaaaatctttctttataatttatatttctactttcttttgaaagaatttgtagtggcttaaacataagagcacaagatgagccagtgacaggaaaaaccaagtgcatctgacatcttagcttattaggtctagaagacaacctccattacttggtagcaagcggctgggaatattggtgttcaaagctgtgctttcctgaaggcaaaaacagcatcaaaatatgaaaagctttttacttctggcatgagtgataaagatgccgatctgagaagcaggtgaaaaaacttagcttatgcttctaaaggctaattttatataagtgttcttgtccagctgttcttggtaagtccagctgctagttgaacaggacaggtggtaatccctgttcagtggctcattatcacccagaggctttgatctggctaatacataatcaatcagcttctgaatattaatattcttcctattttcatttcacttgttttacctaaatttattttccaaagttccagtatgtttttgttttttaataagatttttgatcatttatttattttgacataactaggctcatgatatgccagctggagtttattacacccctgaatcacaaactttttttcttccctctttatctccttacaagatccaaattgcaaaacctaaggataaagttctaattttggaagcacaaaagactgaaactattttagaggagagcgttaatgaaaatcaatatctaaaatcctcattttaagactgtgaaccctatagtctatacttctagtgtcttcagagttgtgatatgcatacattaaggactaagaaacatttttttaaatagtcagatttgggagcattagatatgtttgtagagggaaaaatcaatttatgataaaaattactgacaatggtttaatttgtattagttttgcccacttccctgttatctcagaatggcacctccatggacagtggaatggtcctaacagcctaaatatggtaagctttaaaaacagatggcttggggccattctgcttattatatcattgctttcaatagcataactgttcttctccaatggccctctttgttgtttgcttcattactggcacatttctttaatatgtaatctataacattaacatgaaaatggctctcaaatactattactttctccatctgtgacccagtactgtttatcatcatctaatgatcattcttattgcagatggccctctttaaatgtttcagaatagcattttaaagacattgagggtgcttcctacgtacattggcagactgaatgttttaatatcgaaaatctcggtctacacgatgtgtgataaatgactggagatgcaaggcaccagtcagttccaaagcaaggtgtaagagggacaggaggagagtgataaaaaagaatacatactttgcgtgtgtgggtgtgggtgtgtgtgtgtgtgtgtgtgtgtgtgtgtgtgtgtgtttaagccattagatttatctttaaggaagcattatctttaaggaaagttggagtaggaagaacaaaatttaatcaaaagaaacagttcttggccagaggaggtggctaatgccggttatccgaacactttgggaggctgaggtgggagcattgcttgaggccagcagttcaagacctgcctagtcaaggtagcgagacaccccacctctgccaaaaaaaagaagaagaagaagaagaagaagaagaagaagaagaagaagaagaagaaacagttcgttattgcagttcttaaagaaggagtttgtgtttcctttctgatcattcaccatggcagtgatacaaaggagtgatatcaaattgataaatgagttccctaaggctcaacatatactaaatgcctatgctgaacttccaggtttcaagtccctagagcctctctgtctgaagatcctatcaccaaggattctttgtcttcatctagtactttctttctcctctctctattctttcctcatttgcggatgcttgctggggcctgtcaatcaaacatagatgatccctgacttacaatggttggatttaggatttttttacttgataatgctgcaaaagtgatacacattcagtagaaaccatacttcaggtatccacacaacccctctgtttttcactttcagtacagtattcaataaattacatgagctattcaatgctttagtataaaataggctttgtgttagatgattttgcccaactgtaggctaacgtaagtgttctgagtaagtttaaggtaggctaggctgagctatgatgttgagtagattaggtatgttaaatgcatttttgacttagaatattttcaacttatgatgagtttattggtacataacctcattgtaagttgaagagcatctgtatctgggttggagcagaagtattgctagtaatgcatccatgagtcaactgtttgcttaattggtatgctaccacacatgtcttgagcttgttcatcccatggcttgccattgtgttggaaaggaaggtgttacagcattgccgttaataacatttctaaatgggaccaaaaacagtattttctttatctgctagatctttttattttcttctttctctgtatacgtgagctgttcccaaaatttagcacacatgttttatgattctcaacataacgtttatggtccttaacattaatctcatattagaaaataaatcatgatgaaggtgaaatatagaccaagcaggggcagttatgaggaccaaatcgtcagtataaaacttttataattaatattttcatgaattgatagcacttgcttcagagagctaaactcagaaaaaagagaaatattctaacctgaaaatatatttttaaaaactcataatttaaggtagggggcaagtagatttggccatattttgggctttcttcaccaattcagacacgataatgactacatttgtatcctagatttaaatttgctagatggaaaagaaacacataaatataaaccccatctgcgcaaacaaacataaccattcacattcttatgcaggattctggggtaggggagggctttttttgtattataacatagcatgttaatttttaagataaaatggaaatatttttgtgcttttgttaatttttatgttaaaaatgacattttaggcacctaatcaaattctctgagttctttcactaaagaattttgcctaatatttgattaaattcattattattaaagatcaatggaatttctttcagtttgaaaagttgaaaaaatgagttgacacattgattcatagaaaaagttatgaaatttgagaaaaattattgaaccaattttatttaaaatacatatagatattatgtgtatctgccttcattttcaggataatgaatgtcagtgttaaatgtggaaacattctaaaattggaaatcagactccacttggttcaaagaacaccttattttagataagccttttaaaataatgattgaaatccagtcaatccataccctcacacataatcctcatgcatgatctttgtttttccctatctctcctctaaatgtcctttacaaagatgagaaatgttcttcccaacacaaaattcctttgattgtatattagaaagaactgacactttgcagcaaggtttaggaaaagctaacgtaagtagagcttctctgaaaactgttttaccaaaacatactggatttactgctgttaaataatggatttttttttttttactatttatatttgctcctcattgaaacttgtaaatgactttattagtcttaggcaacacatttcattttgcattggataaagatgcttcttcagtaaagtgttcatttatagcattgagaatcttgaaatataaccggtgtcatcaaagggtaggaaggtagaggcacagagaagtgattaatcacttttccctccaatgaatgatctactgtcaagttcaataatcatatttcatctataaagagcactttgagcaaagcctgttttgcacacgtcattacatttgattacaattaagtataaatatatgcctattatttagctctagttaaaatctgcaaaaatatagaaggcttgtgggtgatgtaaattggagatttgcataggtttagggtacaatattagaaaacactgtagttttatttttgctttatgactaaaaggcactagctatgttatctcgtttgttcaccaaactaaaaaacaacagctaaaaagcaatgtaacaaatttcctctaaccttcttaacccatccactgctgtcgcatgactctcacaaatcagaaataaagaaccatttctctactgaaggtcatcaactcatttgagggccatagatcagtaaaaaataacttagtctgagacattcaaatcacttgctttttaggtaaatattttggcttttaaaatgacacaaatctgaccaaaatgttactcagctttatgggaacgggattcttttctagataatcttagggacgatcttaactcatattgtttttgttcagagactaggtctaatttgttagaagtgctgccatgggatctcattctactcaacaggagtgcattcttcttatccagtatccactaaaagtcactcctcctcccatgaaaagagttgccagtggaaaactcagagaaaacatgggaagggattggtgatgtcatataaggagattagaaaacatttttttaacgtttaaaaagtaaagagatgaattttaaaatttacaaaccaataagtttgatgttgatgagcaacaaaatcctggaaaatgacatcgtactgattattaatgattacataggataacatgctgctgggaatcagcgtgatactctcaaaatctgccatgtcacatgcacctcattttcattttttttatggctgcttgatggttagatgagaagactgttagagacagcataacttaggattttacaccacatttttcaagttctcttttgagaatattgggtacaagataaagaacagtggggctggctaataggctgaatttgaagctgattaaataatgacatctaaagaatgtcaattaatagatctagatcaacacaaaatagagtctctgtcgttggccctgcctttgcacatggctgtttcttcttcagtcatctcttaagctcaactcagccctctgcctgaagacctcatttggccagttttgcccattcattactactgtgaactctcttttgttatttttttcctgttttattctgagaatggattgagctagatatgtggaagttatgggaaagcatattttaactaaatattaaagaaacttttgtaatcgagctctccaaaaaataaaatccgccactttgaaaagcattaaactccctgtacagtagattttcaagactgaaatgactgtctcacccctaaaggcaatttctgtattggatgagaggatataattcattaacctttaaggtcacttgtgaatctaatgttttgatattttcggaattaatcagaagggaactgacagcatgacctgaatctgtcctatatttatgtaaacatcctgtgtgatgcacctcattctttgtgcagttgtatgcatttttgaatgttaaatttgattttagggcaaacgcttttttaaaaaaattttaaaataaactttattaaataaaaatttacacacagtaaactgcctccatttaaagtggttcagcgatttttggcagatgtgtacttgtgaaaccaccactgcagtcaaatgacagaacgttcttactcccccaaaagcctccttgtgcccctttgcaggtcatttttcctttcacccctgattctaggcaaccactgatcgtctttctctcactgtgtattactttgcattttcaagaattttctataaatagaatcatacagtatttttgtatgtatctggtctcttatattcagcataatgattttgtttccagcttgaggatattatgaataagactgctaaaaattgtatacttgtttttctaaataccccttataaaatcttacttttgagaagcatattactaaaataacttcccaggttatatgtgtatttgttctttctgttcatttcagcattatcttattaacaagcaactggaggacatgcaccaaggataaattgactaggtgctaactgaatttgtgagaaaggcctagtttctaacgttctttcttgggagcagatgtgtaacagctacttttgctgtataacagaccaaccccaaaacttactggcttaacactgaggtcagcaaacattttctgtaaaggacaacatagtaaacactataggctttgtggagcactttgcatctttgttgcacattctttttctttttacaactctaaaaatgtagtcatacttagctgagaggctgtacagaagcaggccatagaccaaatttgaacaatagttcataaactctataacacaatggccagccatttacttagctcactatttgatgggtggattgggccatttatgtggtgtgaccagttgtactactgtttgccaggcatgcttatgcatctgtagtcagctggcagctggataagctatcgtgacctgactcatatgtctgatggttgacaggctgtcatctaggaacagatgcaactaggtttgtgtgtatctcatcatccaacatgctagttcaggctagttcacatggaaacttctcaggtttctgcttgtgtcatgtttggtagtgtccattagccgaagcaagtcatgtcatagggccatcccagatgtaaggagtggggaaagactccacctgttggtgggaagagatacaaaggcacactgcaagagctggacaccaaggagagggctagaacttttggccatgttgcaagatatcacaaaatattcaagaaaagttacaggaaggttcctctgtggactaaattctcttctgaatttagatgtaggtaaaatggagtgtgctgttaaaattcatgctttgtgagtaatcattgctaggctaaactgtttgtggcttcacagccaatggtagacatacagcatccataatctagtgcttttaaaaatataagaaatactgattacaaacatagttaaccacttattagtactgggaatttaatgaaagctgctgtgattaaatactgaaaaaagaaagattgtgggtttccttctggtaactttcaaagctggtcactcttttgaaaggaattttattcttaaagctgttatttttactcataatatgcttaatacccccatggctgcagactgtctaaaatgttcctacaattatatgagaatacttttaaaaatcatgataattatcagtcttcatggacacttattcagattaatttccccaagcacttaataggatgaatttataagcattaaatagaatggggaccatccagccctaaaatgtgaccattctgtcaggcacacacttgccaatttgttggcgtggacctgagcacactagcaaggactttgaattaggtctcactgcaagatggaagcagaagggcatttctcagtttatgttttgaagtgttttgttcagacaggcaacgtgcagttgtgtatagtagtgtgagctacctgttactccccttaacaatacttttagcagcaatgtttttcctcctgcaatgtgacaatatcaccatgccatttggaagaaaacaaaaaggctgagtgattcctggtatactcccaaacagccacccaaacgaacagctggcagagaagacaccccctaaaacttggagcagattctcagcccctgcagcatctcatgtggttagaacttcagacttgatgaacgcctccccaacttgctccccctcctgaatcttttaatcctcctccagtctcttgtaatgttccagcccttaccagggaataagactgcaaactgtcttccgtcaacttctttccaaatcctagtctagagaaattataatgatgcatgattgtccagtgggcatgtatagtttgtccatttctttatgtagtaaagcctgtagctttcatcttttttgccaatccactataaaaattaattttatatgtcatcctggtacacacacacacgcacacacgcatctatatctgtaaatctttttctgtctattcatgcttgtatgattgaaagaaaagtttcacaaaacattacttacccataccaaatagtacactttcatattttttttttttttttaatttcaacttctattttagatacaggaggtacatgtacaggtttgttacatgggaacattgcatgatgctaaggtgtggggctcatgacctgttacccagattgtgagcatagtacccaataggtagttttataacccattttccccactccaacctctacactgtcatattttctattcttttctgtttcattaagaacaatactggtaatgatccactatatagatttcatgacgtactaagggttcatgacctgcagtttgaaaaacactgtagttagttttatctccacctcaggccaggtcatcagaaagctgcattcttagaccactttgccttggcccccataagattgcctcaactcaggtgtacctcggcatcatgttcctggcttatgtcgaggggcactgaaaactgctgaagggatttttctgaaagtcgacaccatgcagtgtctcccaccttagatcccatgcagatctgtttattcaatctaagtcattccagacttggattttcctttgtttcacttacactctttcctccttatcaataatccaaataataaaatcgatcatatttccttttatattttttcttttgctttgacatctacaaaggccacaaccaaattatacccaccttttaaaacacttttttactgaaatatattaggcatgtagaaaataagggagatgctggttaaaggatatgaaacttcggttaggaggaataagttcaagagctctattgtacaccatggtgactataggtaatgaaaatctagtatagtcttgaaaattgctaagagagtagatttaagtattatcaccataagaaatgataagtatatgaggtaatgcatatgttacttagcttggtttagccattccacagtgtatacatatttcaaaacatgttatacatgataaagatatacaatttttatttgtcaattaaaaaaaaagaaaaaatggcttaaacttatacagttcagtgaattttcacaatctgaacacactcatttaaccagcatccaaataaagaaacagaacattaccaacctttagaaggccctttgtgtgcccttctgatagttacctgtcctccaagggtaaccacaatcttgattttgaacaccattaaatattctggcctgttcttgtcctttatataaatgaaattgcacagcatgtactcttttgtgtctgacttctttaaacctggattcatccatgctgttgtatgaagtggtggattgttcattctaattgctatgtaatatcccattgtgtcaatatcctgcagtatattatatactctactgtggatgggcatttggtagaaaaaaatgatgttataaacattctaagacatgccatttgatgaatatatgtatgcattcctttgaggactatatcaaggggtagaatttctgggttatagggtctgtgtgtgttcagcttctgtacattcttccaaacagttttccaatgtggttgtaccagtttgcactcctactaacagagcatgagagttgtagttgctccacatcctttctaaccctgtgttgtttgtcttgctcattctggtgggtatgcatagcaaaattttcataaccacatcatgcactgtgatcttcaaagctgtgttctggctgggcatggtggctcacacctgtaatccctacactttgggaggccaaggtgggctgatcactagaggtcaggagttcgacaccagcccggccaacatggtgaaaccccgtctctaccaaaaatacaaaaaaattagccgggcgtggtggcaggcacctgtaatcccagctacttgggaggctgaggcacgagaattgcttgaagctgggaggcagagtttgcagtgagccgagatcgtgccactgctctccgacctgggtgacagagtgagactccgtctcaaaacaaaaaacaaaaaacaaatctgtgttctaaattttcctcgcttcttaaagttttatgctatttatatttccttagtgctgggttttattaatttttaagagttatacattgttataagttgccctaaagcctttacagaacaatgcacagtataaatatgtacatagtatatacacaaatatgaatccatgaatgcacagctaatagggccattatcaaaaatcctacacttttccttttcctctagccctcacattcaattggctcaaaagtagcattgattttattctataacctgtcatgaattcagcctctccacaaattcccagtgctcctttcttagttcagactttcatccactcttaactgggctgttgtcatcatctacttggcatacatttccattctgatccctaccctcttttccacccttgtttcttcccacctcaaatttaattctattttaaaaagaaagatattcaaaagtacaggtggtgccaattttttcttctctatccatcatatgcaaagaggcttccaattctttgtcgacctgtttctaagggatgagagtaggtcaagctgtgaggacttcaattcccacgtgaaggtcttgttcatattaactcaataatgtgctttgatgtcctaatggggaaagtagtattttctgccagttagccttcccaagatatcaaatccaatattggccaaatacatttttgaattcctaaaaagcctaaactgatgtcgtaacacagctgtatattaacataaaaactctgtaccttagtaaattattaatatgagcgattagctcacagagtcaatgtaagaaacttgtttcaactcttcatattctagcaaaaagaacacacacacacacacacacacacacacacacacacacacacaaaacctgatttaagaactaactaggtgattaaagcctacttagtttttaattgaagtgcatattctctaatcccaagaggccaaactaatcacctttccctttttgctgctttttttctctctatttctgtaattattataatctgtctgatactgtgtttagctatatatgggtctatcttctctcattagatcataagctccttaaggaaaaggccatatttccttgggatcccacttaaaaaaaaactggattacaatgttgaaatttttatatatttccatgtcattctccaaacactccccagtttttaccaaccataaagaaaaaatgagaagagtttaaatgataagcaaatacatatgtaagtgttccataaatacactatgtttgaagttatttaaagaacttaatataggataatatttaatagagaaacttagtctagatagagcacataaaaaacattcttggaaatttgtggataaataaaagttccttgcatctgtattttcctttcatcttgaaaacatgccttgacaaaagtaagccagagctggagtacaagattcagacattggtagatcattaattggttaaactggattttatcttatttccccttttatggatccctgtctttgtgtggaattcctgccacttgctggctgttcaaggcttgccaccaggagactttctccatcaagctaggggatatttctccctcactgtcccccaccaaatcaatattcacttgctctctgactactccaggtttctgctgtctgagaatatgaacatggatataccttttaacatgcgtgaatactattcatattttaatctcggccccactgaatgatagcaaacgctgtgaattttatgcctatctcaggctacagctagtgccttatcttgcacacacacaaaaaaaatcttacttttcctacttgcttccttcttaagtgtaaaaagcaaaaagaggaaaggtgccttttgtaaactgctaaagagcagtttacagaagagcagtttactaaactcagacctctcattttccctcacacgacaatctaaaacagaatgttaaagtgaatttatttggttctgtatacctaactattcctgaacatactgagttctcttttaagaaatcatacctgcctgacaggctgctttgcatgaacacagcattccccagccttcaaattgctgtcagagccgttgtgtcattttgacccacaatatggcagtattatccacattctatagatgagttaacaaaagcttccaagtggttaagtgacttgcctgtaaagggttaagtgacccacctctaaggggtagaattggtctggacactctgcccctctatcttcatgcctttgctataatacacagctacgcttgctgaagattaaggaagctgcttttgataaagcgtgattcttgtagatattcatctcaggaaaaaaaaaaagaaaaacgctggtgtcttcatctgtagcatttgattattacattttccttatctgtttcaacttaggatgacttccttgttcgcttaattgactggtaattcctttgtttacttttttccaaatctcaagaagcaagtctagagtattaacaatggttacattagcatttaaaatttttttttgaaatttgagtatttcagaaaggggtaatttaggcaggcatgtatgtagaactttgcattttaattaaaaagactcaaaatgaaatgaacctctgacagtaacagatgactacttctaaaagctgcattactacttgatatatgctcagtattttcttgtgggtaagtcctacgacttgtttcaagaaaagtgacaggactaaaacaattaaaaaagacaaagctgctgttttttaatcatatgttcataaataaaactaggttgtgaattgtttccagagaagcaattgacaaagtatgagtaaatcactctaagaactaaagctgcgttgattttttttaatgttcaaccaaacatctatccttgtccaatgatgaattttctttgacaaataaatatttacaaagtatgaaatatagactctgtgcctttcctaaggccaaagcatactgtttaaactaaaatttaattttttttctcacctcaaatacaccaaaataagaacataactaaaaattaattctctcttgtagtagactgtccattaatcttttgttagataatattagcattgtgagtgtcaggtagaaagaaaaactgtaatttctagattgatcagaaaatgtgagtatttatggatttgaagaaaacaataaagtctgataaaatagaattttctgtaacctcccttatggagtcaagaaggaggaatctttcaacatcctcccattttgcagtgaaaagtcttcatgcagtaaatagtttgcttgggtagatcaaagggttaatttacttctgatttgagaagagacgcagacttccctgatttttttacaaaaatgtgttgtgtgggaggaaggtagaggcctcagaatgaattcactaattggggttttcacctgctgtgagtctaatcgaatacaaagccttatttgtagctgaagaggaagagagattatgcagagtgtaagaatttctgcccagttttgaaattccgcttatttggcacaatcggtggggaaaggcagacaaatagttacaagtttgagctgttaaggtagaccaggaatgctgtagtcagatatacttgaaccacattaaccagtgatccatttttagcaggaggtggtgtgggtcatatacatgggttatcgctatagctggcaggctaataggtactccaaattctttcccatgaagcaaccgtcggcctgtgaggttaatgaagtatggctttattttagtgaagatgctaaaattcacatctttttagatgttcggcttgatataggtggctctgtgaagctttgagaaatcttattaaaagaaaactgtgtgagagtgaagcagagctcgactttatctggaacctgtctggtgaaatctctggtttagatggcagctggctcacagagaactttcctgagtctggcttactctgcctccctaaagagacagggcctggaaaaataggcttttgtgtgggtgtgaagtgctctgtgtctgaacttagaggcctcttcatttgctggttaatgtgacctggctggatattcttacatccagaagatgttggtttcagattgatctagggggattgttatatatatatttcaattagtatgctataatatttgccctaaccagcaatgattcaccatacaccaacccatttgttagatgtctgagtcactgttcatggttagtacttgtactatgcaaagaggaatatggaattcttatgtctttattgtatacccaaatgctgacattttactatagaatatgtattcgagttaattgaagtgatacctatactctaaatgaatttttataaagtgatgcaggttatactaaaacttagggcgcactatagatagagagaagctgaaccctaggagttggtgaagtctctcgggaccatccctccaggcaagtacccagttcaaaccattccttgtctttgtcctttcctatgccactctgcatttttacacagctagcatcaggccaacattgaaaccacatgcaacccagaaaggaaaaagatgtgtttgtggaaggtaggaacagcctagtttcagctgttggcccttcacagcctccactagatgggctcattcgaacccaagacccttccaacagtacactgcaaatccatagctccaattcagacatcttccctctgagctcaagactcagatgtccaactgtctcttggatacctgcacttttacatcaccacctccaattcattatgttcaagactggattcatcatctctttcctaaccctcttctgccccctcctcctgaaattcctagctcggagaatgctactcatccaatctttgttgtcactcaaggacaatggtccttaaccttcactgcatattagaatcacttggagagtcttagaaatcctaatgtccaagaccaattaaattagaatctcagggtggtgagacccaaacatctaaatttattaacaatccctgagtgattccaaagggcggccaagcttgaggactattgctttacttcttccctctcttccattcatacatccagtcagtcaagactcctgtagttggaaccttattgtatcatttctccacctcctctgccactgctgtaattcagatcctcctcatactgcaatctccttgtacctgatgtctgaatttcagactcttgtcttctgatcaagcccccataccattgcctgagtgatttttctaaaagacaaaccggacagagccacactcatgctttaattctttcttccttaaaaagctccctcatacctttcaggatacaagtcaaactccagattgtcacactaagccctttccagtttgcccatttctctaacccttatcttgacattctctccaaaagatcaagcagaccgttgaagctcttgtaaagaacaagctggttgcatcctttttaccctcacatctgctgttgtcaccatcataattgttgatatgcctttaccctcaaaaggccagaagctctttgtgggcctacagaggaggcttctctgaatatttatccaatgactgagtctcatctgctttttagccccagagtggggggatctgactttctcctctatcagtagtccccactcagcatcaagtctattgccccagagggtggctttggctggatgggtctcagtttggtcagggtcctgggagaaacagatggtacattcaaacggaacacttgaagagagtataatgaaaaggctatttacaaggctctaggcaggctaggagaaaaaaaaaaaaacaaggaatggtaaacttttgcccaaagggataaagggaggaatggtttgcgtaactggtggaatgctattgctgtaggaaaggactggccaacaagacttgtggctgcaggtcaaggaactcagcagctgccaggccagagatcagtaggagggaacctgaagaataaatacccaaacatcaccttcctcctgtcctttcctctccttctgtaggcctttcatcactgcctcccaattggctgaaagcaaaaggaagccaaacggcaggaaagcctgattgatgtccccacagaggtccaacctcctgggccacagagcagaatggagaaggacaaagaatagagatggatgggagaatggggaagcatcctgcacagtcccttaggtcagagatgcccttattctctaaagataccctcaaagtttaagtggttcaaagaccagagttttggctacgggaaaatgtactgggtcgccttctttgacctcatcccatttcatttcttctttatctctatttctagcaaatttactcttctctgctctgagccatcagtgagattgtctatgagtatactagaaaaaacacagacctttctcacaggaaaagaagccatgtctcttcatggcagcatagcagaatagctaagcgcatgagtcttcgagctggattccccaattccaatccttgcaccattctagacagtggtactgggaacaagtaggtcatggctgattctgaagtcaaaattttagctgaagtttgttctggtagcagagcttcaggctcttttcatgtccgtggttcatatcaaaacagtaataataataataataatataatcagaaggaggagaagaagaaacatctactataaacaaacaatatattatcatacatggcatcactacataatttacatatgacacgaaggtatatcaattatgttcttttccaaatgctttcctctaataagcaaaattcataatctgactgcaattgaacaacaaaacagtctctgtgatgcccgcgtcatttcttaatactttcagtatttaattataatatgacgtcaagatttgggaacaagtcttcaagtgcctataactccagtctaaaaaagaacttaaagatgtatttttgaggattgccatctgtcaatttttttaaaaagtctgaatagtgatttcttattccattcttttttcttgtcaacagattattcttagtagttttctaattggacactgagaaaagagacttaagcatttatagagaagcgtgtcagaactcctgaattttgagcaggtaatttaaaagtgtaaaacaaacaaacaaaaaacaggaaaggaagagagtgacaaatgtcttactatccaggtgttacaaatccttagtttatcgatttgtaatatttacaaatgtccatgctctgaggcttctgtcttttcgttgaaataaacataaacagtagttaagtgatttgccacactgacacagagattggtgtctctgatttactgcaaagggcactacttcctcattacaggacactaatccctcttccccaaggatcggagcagacctagaatatactattagaccaagggacaacttcagccaaagcaaatcttagtgtgcccccctcagaccgtaatagcagctgcctccacaactcactagcttaaaattgctaaagggcaacactaagtaatctcagtgtatgagccagaatgccagaagaagtgccatatttgcttaaaaatagcaataccgatcatacttacatgcacatatctttagtgataacatttacctttatatttggtttgttaaaggtaataaagaatcctggcattcccttttgcttttgtccagatactttatttttgcctcttttgccatgctatagcattagataaagcaaaacgggtgtgcttccacctaaaacattctagggggaaaaatgttgagcagaaaaggattatttcaaaagaagccggatatggtggcatgcacctgtcatcgcaggcacttggaggctgaagtgggaggattgcttgagcccaggagttgggagaccagcctgggcaacacagtgagacccccatcccttaagaaataaattttaaaaaggggaccacatttaaactgtagaccgaagtggaatgaatcaatcggaaaggagagtggaaagcaaatgtttgaaagaaaataaaaagaaaagcaagccaacaaaataaatggacaaagaagggcagtgaaaatatcactaacagtttatcgtaagatgctctttggatgctaatctaaggtgttatgtgaagtttgcagaaaattcttgtgctaatgaaggctttcttcttcttttgagtatttccaagcttgaaataattgtgtgtagttaacttctatcatcatactgcaaactctaaaattagaattatttgaactgttcaggccctgtaacttttccaataaaatattctattagaaacaagttccttctagatcttcctaaaagaatactaaaggaccaaaccgtgcaacagcactggtggtattgtcttaatttagagagtccataccagtgattctcaaacattagtatgctcagagtttctggttcaataggtctgggccgggcccagggaattttcatttctaagaagttcgcaggtgatactgataactgctgttcccagggtctacattttgagatccgctgctatgtcacaaatccaaatccaaagtctttttaacaatcccttttagcccaggatgagcctaacggcaatttcacgtccttatcgccggccactttaatcttcaactgaggaggaagggagagtgagaattatgtatataatttttttcttttattttttaaaaagaaaactccaagcccacactcttaattatctgggatgaggtcatttgcacctgggtcatttatttagacaacaagtagtcttgctagaggctttaaggaggtgttagcagagcggtgtgtggcttccaggttcctgggtctaccttaaatccccatcctctttctttctttctttctttctttctttctcttttctttttcctttccgttttgaaagccccaactgcccagtctctgggtgtccgggttcccaggtccctaggtgggggcggagcccgacacggccccgccccgtctgcccgcagcgccccctccccggcccgcccgcgccggctcctccgcagtgctttcagctgtgagcttgggcggcggcggcggcggcgctccactttcggggagcccggcggctctgggaagctcactcctccactcgtacccacactcgaccgcggagcccttgcagccatgagggaacagctcaaagggtaagtggatcgcggccccggccccgtctgatggccgcaatccgtgcacttgtggcgcgagcagggggcaagctgaggcggtcaaaacttggacaggcgcggcggctggacccggggcgccgggcggctgggcgtctaggaacctctcccgcgggttcccgcggcgcggctgcaggtgcgcccccggggtttctccccaggcgccgggctagtgggggaacctcttccctcggctttgggacgggctcggagagaaaaagctgatttctccccgtccccagaggggataacgcgttcctcacgcggggattggggccgggggagcttttcactcctttccaggctgccagtgtggacgtgagcaaggctggctgttcctaaatcgtcgctcttactcgtagaaggaaggggcgcacgcggcgctaccttccattgcactgcaagtgccaaaaggtcaactttctgcctgatttcttccgaggattccaactgacatttccctcgctgcattttctaccgtgctcattccatgccccaagacctgcagaaatcaggaaagaaagaacaaacaactaaagcccagaagtcaaagatttcagggggtggggatttttgtttgtttgggcttttttttttttttttttttttttgcccttcgggattgggtgtggagtcatttctagggtgttctctcgcatttctccaggtgtctgtgctcatcttcaagcaaagtttgtcactcccaatcccagcacggcaataaaaagggcagaacactttgcttatattagtcaaatttgaagttaagtttgaagctttaaattgaaggggtttagttgctcgagggaggcataatattaattataaactgtttttacatcatgaaaaaaatccatccgatttaagtggtgaacttttaagtggcgtctttaagtgaaatctacatttttccttgggcaataaactcttcttggtcttctgctttatccctgtcatctctccttgtcacccaccccccccccccccacacccccaatcaacctttctttttttgcctagcttttttattgccttttactcaagcccctctttggaggatacatttgctgttggagaagcgagtggagcaaatgaagcaacacggttatatgaaaggtctctgacccttgaacaccgtggaattggtttcagtcatcattgtttgatctccgattggacacgaccctgaaaagaaattgctttgaccaaagttgagggtgggtaggagttaaaccttgaaaagcaaataaaacggaggacaactaacagctggaacagccaccgaggcaatcatctttgccctggctttagccagacagaataaaatggtaaatatcccagggaacaagaaatggggaactagaatggatttctgatgcttatattgatgcccacccctccaaacccctgccccacggtagcagaaactttaaaatatattttaccatccacaccctgccagtattccagcaatgcaagccaagttcaacaattcagcacgcaaatgccaaggttcctctagaaaaagagtctgatcctcagattaaagggaaatcatttgtgtgtgtggatcaatgggctccagattatatatgaaaccaaactctaatcctctgcaaatcgcaagagaacgctccctttttatattgctgcatagcgattagttttctccctgggaagtagtggacagatagttttttaaaaaggcaactgtttggaatattttcagtaccaaataacaatggtggcagaagaaatcttattttaattaggcaactgccattttcccagccacagcagtagatatttgttactttttataagtgtttaatgtttgtttttaagaaactaaaaaagcaattccaataagtctgattattccagcactgacagcaggaacagctctgaggcagttataataaccttgcacactacttgaaactaaagcaggtgagagaaaatttaaattgtatggtaggaaattaggtcagccttgtgctcagtagagtaatgctttaatttcttattattgacaagtaggtgttgctggggtcttttgtcatagtcgatgactttatattttaatttgcatcagggtcctatcaccgcctcaaataaaagggaaaaagattatcatggtttgtagaaagaagaaggagaggggaaatcttcgtataaatactgctcagagaggcatatctgatgccaggctttggaaccagcagggccaaaatcaataacattttttaaagatgtaaagagcgttttaaggattatttatgaagctgatctctgtgttaatgtacgtacagacttgtgatctatgttgaacattgttgttctcagaaaggccaaacaaagatgtacccattaacatgtgaacaggtttcagaatttcccttttggttgttcatggtatatggggagtgtatttccgatgtggagagtgaaatgcagaaaagagacaattaccaaaacagtgccacccacccttccactccctcctccctagcacaccgtgtttttctatatcgtctgcatattccaggtaaatgtgggctcttctcatggagttactgagaattctctactgttttagaaggcaggcacagagtaagaaacgaagctgtaaaatcggtattgatcacagacaaaaatgtggtttgtccttcaaggtacaagatagatatgagttatgcagatttgtgcttacagtttcatccagtccatattcatagttcctatctattttggagggttaaatgtgtcccagtggggctctggattcatcacaggtagaaaataacaagccgtgaagtgaatatttggttcgtcatatagttaccaaagaatctgaaggttttttggctacgttgccaagcatttttagcattaaatgattaaaagactatttttctcgttttaagaattagtcacaccctttattcttttcttctttccacttgtgctcacttcttttgcttagaactgatttgcaattgaagtgaaactaagactgcaaaggtgaaatctaaatctgtttttctagttcttttgcattgcttagaaataaaaggtttgtgtgttgaaggtgagaaaggttagcttctggaattgtttgaggagttcatttatctatgttattcaagtcccccagaatcacagataactgggagaatagtacctatcaaggactagtatcttaactcacaaatgggcaatggaattgggggcttagaatttcctccttcttccagtaaaggagattttcagttttgccgaggactgatggattaaaaaaaaataatttctaaaacccttttcataattttaaccttcaaaataaattctttaaaaaggcaggaatgtatgtatgccaacagtcatgaaatttctttagaagatggggagctccatgaagccctcattcattctatgtgggattctcctgtaaattgtacacactgtttccctttccttttagaactgtgtttggtacaggtttatttcttgcctatgttcctctaatttgaagtccattccagatggtggcttttcaccgtggttccctgtctctgtctgatcaggcttatcagctcagctaaatgtttttctgcagacctatagaagatgctacggtccttacaaatatcctggagatgggacattgttgttacacagtgtgactagtaagggcctgtgtgagcccttgtacatgtgggcacacatgtgtgtgcttcctctcttcgctcttcctttctccctggtgcttatatcacatctggatgacctttggaaatagaggaggcctgaatgcagggtggtctcaatagaaggtaacctttccttgctctgcacttatatatggaattggtatacactcactttccgagctgagaaatgcctgagaacaagcaacactttttccacgaagctgcaagctgcagcctccttgtgctgtgcatgtaaagtaccagtcctgcctaccccttctccagatcataaaccggcttggtcatggggtgtcctaaaaccccttaaagcatagagaccatatctcctgctcttcttgctctttaagacttgaatgtcactctgttatattccctcaactgataagcccttgttatagtcctcaaatgtgagttgtctctatggaaaagtaaaactgaaataaacgtatttggaagacagtgaaacagcacttcacaagtgaacattttcttgcaaattgatttcagtagccctcactgttcaatcactgactagtaaatattacagggatggtctttgaagttgtacagtttggatgatttccatatgtctttatgaggtttatgattgtgttccatttcttaaaccaacttaaacggttgttttaacttattttttttaaacataggtgataacatgtagtgtgttggttttgctctctaggaagggtctttcttcgccttgattgacttaattacagttggatccacatctatattgtaatcaactaataacagatttgcttttaatagatgacaatttgaggggcacatgataccaaaagcgaccacatattgagcaccaaatggtgccggtcacttacctatttcaactaatcctttaaccctccaaggtaggcaggcttgctttaaatttcaccgccagtagggcgcagagccctaaaattcaaaacatacgctaaggccattcgacattgttgcctctccagactcctctttctgtgtgaggcccctgtactttctggtcctctggaaatgccccagtttaagcgatttctcttttttccttccctccccttcccctcaaaagtttatgaataggctctgcatatgagtacccaaatatcattcagaactgcattttactgtatcaaagcctgtcatgcaatccctgaaaactggaaatatgacgctatggtgatttatgtagatgggccaaagtaaggaaaagtatatgtagttatttctccagggtttattcatgtaattgaatgaggaacaaaggtgttttgttctttttgtggcaggagctgatagccagcaaccacacttcaagaaatggaagacagctgtgaatgcttcattcaggcccaagtaaatataggaagaggtgtagtggtgtatagcgtactgcgtttaaagaaaaaacactctgaaataatgggaagaaggaagttatgatatattagtcaggcagtagatataccttaagctgaaatgaaatacaggtatcatggatatgagatctgtatatgtagaggaaagagtaatggaaaaatgtcaggggcagtgaaagcaaatgagaagtgagatgatttatatttattgaactaatgtccggtatctctttgacagagttgaataataatcagttgtcggtgtcctttctgtagtgttccacattggatgggtgaagaagtcctgatagtcgattattgatcacataacaaggtcaatttatcataactgaagtgcgatcgatttgtgggtgcaaagaagaaacaaattctggaaccgaataatgtttatattgcttttctctttggaaacaaagcagaaaggggcctttctgcttgtaagataaacatttcttcaatacactatggaagcgctttgaaataaagattccgaatggttcaaaagcaaaaatcatgttgttgttattgttgttttcttttttcctgttttcttgactactcattgtaaatgctaaagtctttctttatgttttgtgttttagccacgagactcaaacaacttgctgggaccatcccaaaatgacagagctctaccagtctttaggtaaggacatggccatgtttcctccaagttaaatgacaggtgacctttaggataaagtagtttgcagtgtgaaagttacttgctatataaatacatcactagattgtttcaagggtgaaagcagtggcaccttcctatccaaaattgacagtcagctttctttttatcagaggttccttaaaaacaagttttagaagttgattgattcctaaaaattcaatatacctgagagggcctataggtctttgtagttctctttggtgcctaaaatgatggaaaaacagttgcaatttatggctatttttttttttcttcccacgaagatagaaaactgtttcaggtgcttgttgatttcttccgtgtgaaaccaagacaacccttttgccaaaccacaaatgttgtgtaaaggaattttctgccgtctttccggtgctcacaattcctaaggcctggcgggtcattaatgtgaacatttaaatgatttctttagtatggcttgttttgtgtttatgtaagagcctgacagttctgttttctttcccctcataacttgaattattttgaatgggtacagagcatacaaataagggtttgaaaacaccagtctttttacactggacaaatgtccagatgtctggtttgtcgttttagatctacaaggaatattctgaaatgagttatcttaagttgcagcttgttttgggttttgttttgggacagggtcttgctctgtctcccaggctggagtgcagtggtgcggttatagcttattgcagcctcgaacccctgggctcatggcggttcttctgcctcagcctcctgagtagctgggacaacaggaatgcaccaccacacccagctcatttttaaaatttatttttatttatttttgtagagatgggtctcactatgttgcccaggctgtgtttttatgtatttttttaatataaaaacgtcatgtcttttctactttttcaagcctgcatttctgtgaatggacatattgatagaaaaacacataaggcgatctctttggatttaaggttatgtgatgaacactgtgggaatcagggtacttaaacataaattctgtgtaggtatacgtaagtggggtgtgtgtgtgtcagggggtacgtagctattactgcttttgtgtcatagattctcacaaaatgaattgcagctatagagacaccaaggactagagaagagatattagccaaaaaatggttttattaaacatttttctaattataaatgattaaatgtcttctagaaaacctgaaaaatgtaaataaaaaacatgaaaaaggaaaaacaaagtcacttatactagccagagagatccaatacatttcgagtaatattatgtcatttcagtctggttataagtgtgtaaacgtttaaaattttaaataaaattgggatcagctaattttcaagtgctacatttccagcccctacagaatgtttttggcttataattgtggactgtttataccacaggtggaaaacgtgaatgcttatcttttggcaaatgagagaatgaaaaggcttcatctgaagtgggcagcagctgtcctgggcaagctggtctttctatcccagtactcccaggacccctgattgtacaagagaaaaactagaaatctgtccacaaagagctaatttaaattagtctgtgggcctcctgatcgtaacctgtggtttacacagatttagcccacttctaacatttcctactctaattacagtaatttctagttgtaatattttaattcactcttattttaaaatcattattattatagaattaatacctattcatatttttgaagtttaaaaatatagacaggctaacaataaagaagagacaaatcattcgtaaccccacttcttagagttagctggtgtttaatagtctaggatcttcaaaaatgtctttctatacatatatttttatagaagttgaatcattctgtcttataacttgctttttttttttccactggaaagtaatgtattaccatggccatatttccattttgttgtatagtattctctaccactttcaattactctgtaatgagaaattgcaaacatgtttgatgaaaagctaattatggactatcaatgaatacatgtttgctcctttaatacaaattaaatatacatttaatcattatatttctaaaattttctccatactttagatgtggtgataaactcaaaactgataatctctcatgacttgtgacattgggcttgtgacatcactcaattttgaattataacagaattttacagttgcaggggattttagaactcatttattgcaaactttctcttttatgaaatcaactttcaggtataatttttatataataaaaggaagtcatcgtaagtgtgtgatcaattccagccccctttgaaattctgtttcttgctagcccaataacaaaccacttgcaagtgaactaagtgttgaagtttgcttttcacctttcagagttaatatttccaatagttttgtaacaatcaaacattcgttgggcttttatccaagtggtgattcatcagataacatctcccatttattgcgggcctattgtatgttttccacatgggatgtgccagcaaccaacctgcatggtggatggtatcaacatccacatttcacaggacagcgaagccaggctcagggaggaattgatcagggctacacagctatgtggggctacacctggatttgtcctcagttttctgttagtactttcactgttctcattgattttatttactaggtaaagtatatttatgttggttactacatacctgctacacgtatataggaattgatagttttacctatgaatagtaagttacttgagtggtatttctggaaatggtatggtgggtcctaaacaatgggcactcctttcactgttgcctggcacatatagaatgattgttatatggctacatccttttttgtttgtttgttttttgagacagattctcactctgtcacccaggctggaatgcagtggcacgatcttggctcacggcaacctccgcctccccaggatgaagtgattctcctgcttcagcctcccgagtagctgggattactaggcacccgccaccatacccagctaatttttgtatttttactagggacggggttttgccatgttggctaggctggtctcgaactcctgacctcaggtgatcctcccaccttggcctcccaaattgttaggattacaagcgtaagccacagcgcccagcctgcctacatccttgagatcccatataagattaactaccagcactgcctttccccctctccaaaattacagtgtttcagagtcgaaacataagcataaaatactgaaaagaaacttttcattgattttagtttttacttattagtttatatttttcttcttcaagaggtatccctttaggtccaaattgctctttgagctggatgaaatggtcggaagccttcaactacagtcagttggtgaaaggtatcttgaaagcagaaatggtgttgtggtctggcgtgtcaaatgtttaagaccacatctagccccctctcctaatcgaacctgaacctcatgtctctggtgaggtgctgaaaatatcaagatgttgctttttccctctgtacccccactccaggcatactctaccgtggaagctacagtggttcacagtatgcatggtaggttacacattcctagagacgcccacttctaaggagatttccattctctaatttgccaaagttcccaagcagcctgttcaacacatgtttatgttacctgccttgccctcaaaagcattcaggtgttcccctgcacccagggtttgaacacaataggattagaaggtgaaaacattttgttagaactgaaaaagtagcaagtatttactgatgaaaagctataatattgcttgagatattaccattggagctctctaatacattctgggtggttttctttttcattccttttccactgattttctacaatgaatttatattatttacagttagatgtttggtaaaaaagtttcttcgtcgatacccccattccatttcttacttagtgtctctatagctacaattcattaactaatgagaacttatgacagaaaagcagcagtagccacacacacacacacacacacacacacacacgccccacatatatgtagataatttatacttaaggaccctgattctcatggactttgtcaggtaactttaaactcaaagagatcatctcatgtatttttagtctgtatgtccagttgtgaaaaatgcagatgtagacattttagtggtagagaaaatagaacttttttgattaaaaaatagataaaaaacaatataagataattaattttagattatttccaacagatctaaaatggctttgcagaggaggtttccatcaagtgttagaaatattgtgtttccctcatttatcggctgtgtacctacacaaaaaattgagagaaaatattgccagagtcctacacaaacaaagcaagacatagtaaagaaataatttaaaggttcactatgatgactgaacagtcattaggaatttgagtccccagaaaattttttacatcacattaatggtttgacaaaagcattgtcttggattttcacagggaataaatcactaaaagcaactggaaatcagttttctttcagcatttgtctgtgactacccccaatagtcatagaatggtagtagagaatagtagtggagtaagtgggatataagagaccaagtgtctcatgtctattttttgtagaccttggtgctttatctttaaaatgtgaggatattggggctgggcacggtggctcacgcctgtaatcccagcactttgggaggtcgaggtgggcggatcacctgagtcaggagatcaagaccttcctggctaacatggtgaaaccccatctttactaaaaaaacaaaaaattagccaggtgtggtggcacatgcctgtaatcccagctactcaagaggccgaggctgaagaatcacttgaacccaggagtcggaggttgcaatgagctgagatcacgctgtagcactccctcctgggcaacaagagtgaaactccatctcaaaaaaaaaaaaaaaaaaaaaaagtaacgatattggacaagtgtctaagatttttgtttttcttttactttgggctgagggtggggcaggctgtttctaaacttgctgtgatcattatttttcaagaggtacctttcggctaactctgcagacaagtggatttctaaaaatgtaatcattcctatgttttaaaatgtacattctgagaaaacaaacaacaggagaagattatgccacccatccgtgtcttacaggctgagtgaggcaagctgttgtcaaatagagaggctcttgagatatttcccattagactcctctgggtcattcatttgttattgagagggtacattcttcgtcactccctagaagtaataatatgtttgattcatgaggtgagttttagatttctattagcatttttacaaatgtaatggaaagactgttccaataggttagcttggtgatttaaaactctgagctcttcaaggctccagaaagcatttacaacatcagtagatgttagatagtaatatgctctggaatttattttgaaatactaatataatattgatttacatgaagtgcaattatgtggttaaaagcctgtccttttctcacaatttatgtctaggtccctaagttcattactgaaattttaagaaaatattttttaaaaagctcaccctgcccccacacacataatatatgctgcttagagatacttttattggggtttttttttttttttttgacagcatcttgctctgtcacatagactggagtgcagtggcctgatcatggctcactgcagctttgaacacccaggctcaagtgaccctcccacctcagccttccaagtagctgggactatagccgtgtgccaccgtgtctggctaatctttttttaaattttttgtagagatggaggtcttaccatgttgcccagcctggtctcaaactcttgggctcaagcgatcctcccaccttggcctcccacagctctgagatcccaagggtgagccactgcacctggccttcacaatttccaatgtcaaatcttactacaaatttaagtaatcaagagtatttacatatggacagatatactgaccaacagagtagaatttaggctgggcacagtggctcacatttgtaatcctagcacttttggaggccgaggcgagcagctcacttgagctcaggagttcaagaccagcctgggcaacgtggtgaaaccccgtctccccatctctacaaaaaatacaaaaattagccgagcatggtggcatgtgcctgtagtcccagatactcaggaggctgaggtgggagggtcgcttgagcccgggaggacgagactgcagtgagccgaggttacatcactgcactccagcctgggcaacagaacgagaccctgtttaaaaacattatttcttagcctgtcttattgggggggggtctcttaattataaatacaataaaatatgtggttccccaatggttcctttttaaattacaatgtgagtttttttgcatttgtgatactgtcagtatagtacaagaagaccagtttatgaaggagacatgtaggtaaaaataggataatgtgaagagagaatcgctgcacttcagaaagctgattttatttcaagcagtttattaaaatctagatgcaccgtatgttctggtgttacttattccaatttccttttccttcattgaagccctcttaaccacaagtgttttctcaaggggtactggttttccttttcttaagttatagcgttcttcagaaggatctagccctttttaatctgttgcccaatttttggatcctactatccagcatgatgctcacctgaatgatgcgaaagctctcaattttcaaaaatggacttctgagtgtttttggaattcttaggaaaagtggtctttaaaaaccataagatttgaaggcagtctatcagcacgtagcccttagcttcatgtctatggtttgcagagagcttcagaatgttaaaatgagggtttaattttagggtctgctgggcctgaggttaggggtgtgattcttcagcagttctagttaggagaactagttaagtcctagttaagtcaatggggctaaaagctttttaaagatacatcaatatcattataaatcagcaatttgcaagagagttaaaaacactgctatcaaaatccttgtacctctttcctcagcttgcccaagaggaagggatattgtagttatttgttcactctcctcttttgataggctttctacattccattaagtattccctcctgaggatgctcttgggttagaaactgcaggattctgaatgactatgaattccttccttttgcattaggagcttgtcctaatgcttttctcagcatattttgtgaactaaactgttctccactaagctactcaatatttagctttccttggctcttgcttctagttccttaatatattgctcagtgttaaaacctctgccttttgactttttactgccataacgctttgaactggaaaggatagctagattcagatgccagctttggtgtgacctcgggcaagtcccttgctttctattggtcttcattttcttatatgtcatgttggccagtgatctttcatcattaaatgactggttttgttttaacccctggctagagtaaagcttggttgtatgaatgttgtcagccctaaacccccagttcctctttgtcaccaccaacctaaaggatatgaataataggataatcatatttattaatttaattttttttttttgagacggagtctcactctgtcgccaggctggagtgcagttgcacgatctcatctcactgcaacctccaccgcccgcgttcaagcgattctcctgcctcagcagcctcccgccaccatgctcagctaatttttgtatttttagtagagacggggtttcaccatgttggccaggatggtctcgatctcttgacctcatgatccacccgcctcggcctcccagagtgctgagattacaggcgtgagccaccgctcctagcctataatcatatttgtaataattgtactttatttgtgtagcactttacaatggcgaagagttttcagaaataaccatatttaatcctcacacagctatagagtaggtggcatatgacctggattttctatcaatttcagtttcagattttttgtcctgtcatccctttgagtgtccttccagtttttgatttgggaaataatgctaccataccggtggatggggcaacttttcccttctttccatttggacttgagcagactgagactcaagacttgatttgatttatactcactatggtagaagataaggaaccaagtccagaacacacattttacaaactccgagttctctgttctcaaaggaacatccattactcttagcatgatttataaaactgctttatcggcataattaaactggaatccatatgacattctttattccctagctgacaaaattagcacaggagatttactcaaatttgttattaaggctgttataaatgttcttcctttactattcagcttataaaagaaaaaagaaaaataatctgctcttttaactttgattaggatccattgactttccccatttgtaaaatagaaatgtaacttccaaatcaaaatttatggcattttaatggactgttctaaatattataatattttttcttgttcaaataacttgatttaaagcttctaattgaagaacataatagatatttctgaattgcatctctccaagcttatttcagaaggaaactcaaaaagaattgttccttagactttgactggtttacagttttaaaagagctgccaaattgtagtttactgatctaaataagaggaacattaaggttacacctgcagctagaagaaaagtgctggatatgtacaattttatgtagctggatctgcagaagatgatttttgcacacagagtaaaggcatctaaaaacgtgtctgctcttattcagacatttccaatatttcttttttaagcccacaagtctgattacctctgtatgtctcttgggagctgcaattttgctggaaagagattcagaacagtcagagcactcacataaaatagatagtttttaaagtctgtaccctctacggtagtaataaaatgacctaaaaatattctgaaagtctctcttatgacatagtggatgaatcattagcttatttatgaattggtgatattctgtgggaatgtttcaaaatttgctattccacaaagcgttcatcgcttgcataactccaggaaagtcattacaccccctcataaatagaagcttatataacggagacaaatgttgcttatattgatatatttacatacagatttctttaccaagcattaattttggtaagaaagtgattgtttttatattttactttcttggtctgtaaagaggctatcactttaaggccaggcatggtggcacgcacctgtagtcccagcgcttccagaggctgaggcagaaggatcccttgagcccaggaatttgagtccagcctgggcaatatagcaagacgttgtcttagaaaaaaaaaaaaagaagctatcactgaagagcagtgcttctcaaactggtgaagggccaggtttttgttggtggtgggtttttttttttgtttttttgagacagagtcttgctctgttgccaggctggagtgcagtggtgcgattttagctcactgcaaactctgcctcccgggttcaagcgattttcctgcctcagcctcccgagtagctgggattacaggtgtgcaccaccacacccagctaatttttgcatttttagtagagacggggtttcaccatgttggctaggatggtctcgatctcttgacctcatgatctgccagcctccgcctcccaaactgctgggattacaggcgtgaaccactgcacccagccgcggtggtggtttttaacatactacacatcacagatttttaggtggtgctaatgaaactgacaagtatgcattcacaccacatgtaactcaacagtcaagttcaacaacacttgacctcgtctgtaccctgctccatgagatgaattcattgatcatgaatttggatgtcatggcaatgtcaaattgctatagaagttacttaacacactgtccatatctatgcttgtgaaagaccatattttgagtagcactgttctagagcacttaatttttgaaagtataaatgtaaactcaaatcaagtgactcaggtcgggggaggataattaaccaaacaggaacacctgaaaatgttatttatgcggtttaatgttttgccagttgagtcaagttcaggcagaggagggatctattttctttcccacttggtagctctccttagcaattgttttagaagacaaagcatagaaatcattgtgttacaggaaggaaccagagattaagcggcagagccactgctgcctagtttaatgtctctcgcaccccctataattaaatataatgtatataatgtgataagtttaaaatacaggtttgcttttatctagaatataaactgtgatatatgcactctttatggggtgcattcagtgggggaactaattgattatactgtgactttcctattgtcactttatgagtttaggtttggaggcaatgttttgcagcaacaaaattgttcattgactttgaggctggatttaaattctgattctgtcaccagttctctgtggtcaaaaaggaagccactaataattttaaacctcagttatgtgatgtattaaatagttatgatgagacttatcttgtgttgtgaggattagaatgacatatgtaaggtaacagaatgtctgatgtagtaactgctcaaggaattataattgctattagtgatatgcattattattattagttattattatcatataccagtgtctctccttatttaataatctattgggttcctgaattgagataccaagaattcagatagtgagagacacctaggtttaggtcttcacatttgacactcaaggagccactaaatttttctgaagtattttacttcttaaccaaggtgataaagatcacctgatcacaatttatcctaacttttggaaagcatacacgtactttaatttgacatgcaaattaaaataatacattttgtactgtgttgtttgccctcccccaattctaaaataatatatcattcaggataaaaaagactacactttgggaggccgaggcaggtggatcacctgaggtcaggagttcgagaccagcctgggcaacacggtgaaaccccatctctactaaaataaaaatttaaaaaagccagaagtggtggcgtctgcctgtagtaccagatactcgggaagctgaggcaggagaattgcttgaacctgggaggcacgggttgcagtgagccaagatcgcaccactgcacttcagcctgggcaacagagtgagactctgtctcaaaaaagagcataaatatctaataaatgatggtggtactagtctgtggtagtggaggtatcacagaatggctgtagagatgaggagggctaaaactgtgaaaagccttatatggtatgttgaaggttttttatactaaggtttttgatttggaagatgtatcaatcagggtctgcctggtcagaaaacataaaccctctagttatttcaaacaaagggaatttaatgcgggaaattggttactcaagaatggaagtgctgagaagccacacacacagcatgaagtttctgttatacctagggctggagggacaatgacaagaggtggtatcaccagagccccagatgtcatgggcatcaaggcggagttggaacctttggccagctgggaccaatgagggaggggctccgagggagctggagccaggaaggagacacagttagccagacctattgccggaggtagaatgaaaaaggaagtacgcccggcttctcctttccgcctgccctctaggcttctgccagtgactcctattggccaaacttacttggaagccaattggtaagggagcaggaaaatgtactgtaataaacagcagagcagagaaaaggcagagaaagtatcaaaaaccaacaagcaaatgattgaagtacaggagatcccatggacagtaaggcaaccaaccctctatgcagatatttcgggaacaagaaacataaaaaaactaaaaagctttcataggagtttgaggtgacatagataagataccagaaggacatcctgggttcaaaggaaactgatcttaaaggagaggaggtagcaattaaaacaaattatctgcagagaagtccaaacactaaggataagcttccatgcatttgatgaaagtacttgcgacgtttacaggtgtttatgctcatgactctcaagactaaatacagacataccttggagattttgcaggttcagttccagaacacttcagtaaagcaaatatcacaataaagtaagtcacacaagtgttttggttttctagtacatataagttatgtttactctataatgtagtctagtaagtgtgcaacagcattatgtcttaaaaaacaatgtacataccttaatttaaaatactttattgttaaaaaagctaacgatcacctgagccttcagccagtaatgatccttttgctggtggagggtcttgcctcgatgttgatggctgcacagcatggtggttgctgaaggttggggtggctgtggcaatttcttaaaataagacaacaatgaagactgccactcagttgactcttccttttgtgaaagatttctctgtagaatgtgatactatctcatgaaaccacttactttgctcatccataagtagcaactccctatccattaaagtttgatcatgaaattgcagcaattcagccatatcttcacgccccacttgtgatttcaattttcttcctgtttccactacatctgcagttacatcctccactgaagtcttgaacccctgacagtcatccatgagggttggaatcaacgtcttccaaactcctggtaatgttgatattttgacgacctcctatcaatcacaaatgttcttaatggcatcaagaatcacttccagagattttttttttttttttttttgagacacagtcttgctatgttgtccaggctggagtgcagtggcgtgatctaggctcactgcaacctctgccttcctgggttcaagtgattcttctgcctcagcttcccgagtagctgggactacaggcgtgtgccactacgcccggctaatttttgtatttttagtagagacggggtttcaccattttggccaggctggtctcaaactcctgacctcatgatccacctgcctcggcctcccaaagtgctgggattacagccgtgagccaccacacctgacttccagagattttccatttactttgcccagatccatcagaggaatcactgtctatgtcaagctatagccttacaaaatatttctcaactaataagagttgaaagtcacaattttttcttaatccttgggctacagaatggatgttgtgtaagcgggcatgaaaacgtgaatctctttgtacatctccatccaagcttttgggtgacaaggtgcattgtcagtgagcagttatattttgaaaggaaacctattttgaacactaggtcttacagtgagcttgaaatattcagtaaaccatgccgtaaacagatacgctgtcatccaagctttgtttttccatttatacagcacaggcaaagtagatttcacataattccttttttttttttccttccaagacggagtcttgctctgtcacccaggctggagtgcagtggtacgatcttggctcactgcaacctccacctcccgggttcaagcaattctcctgcctcagcctcctgagtagctgggattacaggcgtctgccaccacacctggttaatttttgtatttttagtggagacggggtttcaccatgttggccaggctggtctccaactcctgacctcgtgatctgcccgcctcagcctcccaaagtgctgggattacaggcatgagccactgtgcccggcctgatttcacataattcttaagggccctgtgatttcagaatggtagatgagcattggcttcaacttagtcaccagctgcattaggccctactaagagatacagcctgtccattgaagctttgaaggcagtcattgatttctcctctagagctatgaaagtcctagatagtatcacctttaaatagaaggctgtttcatctatgttgaaaatctgttgttcgttgtagccaccttcatccatgaccttagcttcatctggaaaacttggctgcagcttctgcatcaatgcttgctgcttcatcttgcaccttaatgttatggatatggcttgtttccttaagcttcttgaagcaacctctactagcttccaacttttcttctgcagcttcctcatctcttttagccttcatagaattgaagggagttaaggttttgctctggattaggctttggcttaaagaaatgttgtggctagtttgatcttctattcagagcactcaaactttctccatatcaggaataaggctgttttactttcttatcatttgtgtgctcgcagggtagtacttttaatttccttcattaacttttcctttgcattcacaacttgactgtttggcatgagaggcctagctttcagtctgtctcatctttcaacatgctttcctcactaagctcaatcattaatagcttctgatgtaaagtgacagaggtatggctctttcttcccttgaacacttagaggccattgtagggttattaattaccctgattttaatattgttgtgtctcagaacaggaaggccagaggagagggaaagagatgggggaacagctggtcggtggagcagtcagaacacgtatgacgttgatcaattaagtttgccatcttatgtgggtgtggttagttgcaccccaaaacaatttcagtagtaacatcaacgattactgatcacgattcaccataatagatataaaaataatgacaaatttgaaatattgagggaattttcaaaacgagacacagacccaaagtgagcacatgctgctggaaaaatgtccatagacatgctcaacacaggattgccacaaaccttcagtttgtaaacaatgcaattttcacaaagtgcaatacagcaaagtgcaatttaatgagatgagcctgtaatgagcctctttaaagcaggaactgtcttcctcatctttgtcaccagtgcctggtgcatggtagcctctgaaaaaataattgttcattgaatgaagcacagtagagcaagggagagtgattttgctcgggaggaaaacaaataccactcaagaagatggaaagatacagatgagggttttctaaggcggattattaaactggcaagatggaactctggagagatggagttctttccagaaagtagaagataaagcctcaaagtaattaaaatagggaatatcagttaagttgtagattttattggcaatttgttatcttagcaaaaccaagtgaactgctattctggaattaattttgccctaaaaggaataattaattgataaggagaaataagacccgtaaaaagtgtcactatggattcagaatttatatgacaaagaaaggaaacactgaacacaatttgatgtgctgatggcctcgttcgttcattggtttcctgcttcagtaaacatttaagagcgtgccatgtattttcaaactttagggcaacaggctaaaaatatcaaggagaaaaacgtttactgagggtatagaagtttttatgatcttacttttattgaacattaaaacatggatgttcattctagaaattttagaaggtgaagtgcaaaaacaaaatgaaaatcacctcacatctcagtacccagaaatagccactatttacattttaaaagattgcttccggtcttctttcctatgcatttttatatagttgtttgagataatagaatgtttaaagtgttgtatcctactgtaatcataagtcttctcttattcttagttcctcagagatgttatttttcgctagttgcagtttattggggtaccacttttgtaaaaaaatatttcccaatttttgaaaattgtgacaaagaaaagtcaaattcgtgttgaatttatggaaggaaatctttaagaatctggaggcttattactaacaagcttctgagaagaaagccaagtaaagtgttataataccttctgtccaacaagctacttatgtataagtgatgttacagaataaagtcagtgtggtcaaaaacagacagtcagttatcagaaagttgataagtaacatttatcctatgaaaaatatagctatgaatttaaatcaatagttttctaccacaaatatcttaatggataaaattttctttaccaaatatgtatggtgtcaaggtgacaaggcaagtatccttgtaaactttccgaattacaggaacaactttgcccttcttagcaagcaattttatacagaaactcaactttatgatgggtttctgtaagttttaatttttataataactgatatgtaaatatttagttacctttaacttatctctccaggtagaatggctagcagactgttttatcttctcaaaacatttgtgtgtacagttcccatgttcttttcaaggttcttgcttctaactgtcagttaaggcttttgtagcctcttacttcagttacattttctggccaagacgcaattaaagaatatagagctgataattatttccatagtcgtttccaatttttctactgttccacgtaagactttgaggaacacctttatgcataacacctttctacatttgattcatgtaagtggaatcactgagtcaaatggtgttaatgtttctaagcttcttggaatgcactgcctgaaactttctcaaaaggctgtagccatttacactcataatacttcaaagtgccaatctaaccatgtccttcccagcatggagtattatttttacttttgctattgtaacaaggaaaattaaaccatctcattgttaatatttgtgtattttttatttctagtgaccacaaatgttttcttttaaatatctgctgggtgtttttcttcttttttgagtaatgtgaaaacaaaacgaagttaaccaaacacaactcttccaaacttttctgatataatacacacttttttgtgtgttatgttgaggggctctagttggtaacagcctcctggttacataaatactgtacagtttaattttttttcagctaaataagccttatccctttatccatccttagtggatctattatctacccattaaattaaattttattctctataccaactcctgtttcttcacattttttaaatatatgcagagccctaaattacagtggctgtcctaataaaaggctattcagttattaacagaaaaggaagattgcttcctgcctcttgggtgaggaagactcatgtataccatagatatggtcagtttacatttacagttttctgtgaggcattgatttttttcccccataaatatggagtacttagaatgttcaaaacctttctctgggtaatagaatgcacaaaagtataaggcatgatccctgttcattgcccaagctggcgtgactctggtcatgcagcggacttcatgatgtgatagaattccttgcctatgagagtgaaggagatggtaccaggtctacttgtggccggtggtggaacacttacattattctaagtcctttctgtctgtagaacccaaatgacaaccatattattttatcttctcttattgctagtggtatcgtttattaatgccaacgtatacccattttgcttttcaaggttactttagatgtcttaggttggaatgactgaaggcttatacattcaaatttatatatgacacacacacacacacacacacacacacacacacatatcttattgttgcctgctatctttctacctgttgtataagaaatcctttgaaaaaagcctatgtcagcttcacaaaagatgttactgtgttttgggggaaataaaattgggaagtaataaaacagttaataaatgttacaagaccgtgtacaccaacttaaataagattaaggtcaaacgtatggtaccttatataggtaggaagagcagtattaattagaataattagggagagttgtttggagagtggaaaaaaacattgttctaggaagaaattttgtaatactcaggtaaagtaaaatgtagggccaagatattccagatagtgtagcagcataaacaaaggtatgaaagactggcttgtttgcgagtcagtgaagacattgttctctgagaatctactccagatttttttttttttttttttttttttttttgctttttgagacagggtctcactttgtcgcccaggctggggtgcagtggtgcgaacatggctcactggtgccacaacctcctgggctcaagtgattctcctgcctcagccccccaggcagctgggactacaggcacacaccgccatacctggctaatttttgtatttttggtagagacagggttttgccatgttatccaggctgttctcaactcttgagctcaagccatctgcccatctcggcttcctaaagtgctgggattacaagaatgagccaccgcgcctggccactccagatttttaaaagggaaatctgattcagtgcccctggggtgaactaagtgccttaaattatagagtgagaaatttacattgcatttgattggcaatgggaaaaacattgttaaatcttcagaaaagagaaataatgaagtccgtcttctgtgttttggaataggaatttggtgggtgagtttaaggacagttagagaggggagagattatttcgttttgttttgaggtaattgacatgatgagggtcttaggatagcaatgggggaaggaaaagggaacgtgactccagaggtttttcttaacaaggtagaattgccagaaggtaatcacagattggacaggttttaaagaaaaagggagttatatgtcttcaaaatttgaaggcgtggtgacacagagaatggtgataccattgaggaaaagaggaaattgcaaactgagcggagcaacagggaatagatatgaatttgattgaattacatacttatgggtttatttacaatttctcttcttagaaaaatttatttttggtggctcatataaatgtatgtgctgccataccataagcatatatttctcattaatcctttcaaaaaccctgtaaaagatatttgtatctccattgtgcagatgaggctcagagaaaataggtaattttctcacattgcaaagcagggatttacgtgtacttttaactcctaaaccagcgatttagcccctcagctatactttcttcctgagaggggacagtggcattttgaagaggaaatactctaaagccatttgaaaaggggaaccgaagaaagagtttggtccacagcatgataaaaatattacttgcacttttattatactttataacaagaagtacaggggcagagaaaggttcctaacttttactgagcaagtatatatccaagatacatctcctctttggagcttttgagatacactatctctcttagttttgcaacagccctaggaataggtactattactgttccctttaaaaatgaacaaaaaaaaaatgaagcttaggaaagttaaggttactagaccaagcttattgggagaccatagtgatgaagaggaagggctttagggtcaaatggatttgaattttacttcttaggcctttggtttccttatttataaaatgggattgaaataatgatatcacagttgaaggtaattatatgagaatttatgttatttattgcaaacatagggtaagcacctaataaatgataacctgagaatttatgttatttattgcaaacatagggtaagcacctaataaatgataaccattattactattattttacagcaaagacataaatagagcccattaagttttcttctctacccagtagtttttccattgtacaatagtactctcctgaaggacagcgggtgaagctaagaatttggaagaaatcccagatagagaaatcttgaaaagaagatagatagatttaatactcaatcattaaaaaaagtgcacatgactttaagaaatcaaacattgtaagaggatagtattgaaaagtaagtctccaaccactcttggtatcaatcccctaattttacttcctagagacaattaacagtatagtttttatgtttgcttctgtaaatatttttgcatatacaaacatacacataaaaatatgcccatttttgcacattgagagtataataggcacaatgttctgttctttgatgctattaccttttacataattaacctggagttttttttttcctgtagcgcaatagactgacagatggtgaatgaaaacttgcactatggagagttatgtcagtgttttaataagacaggaacccagaaataaatgtacgaagtttaacatcagcatctcgtggcctttaagtcaaattggacaaccattcaaagcttcataaatgctaactgcttctcatgacttcagaagcaaacaaaaaaatcattattcaaatgggaaattaagctgatcatcagaagtacagagaggatgtcctttcttaaaggcggcacgtctaagggagtgtctgagacctggcttcttcattcaggatggaggctgctgctactctttaaaagaaatgttcacatccttacttcctgacttccttctataacacagtctgcttcacaacactatgactttatatgtcagagcgggttaggaggagctgaatcttaaaaatttaagaagatgccaaggtctagaaaccactcttaacaggggaaaattagaccctgcttgcttttgggaaaatttgttttccagtcagatgtttgtcaaggttaaagaaattcacgggccctctgttcgaattgggagcaattgggagcccttaagctgaatgagtagacttgaagtcccacttagaatgagcctttatatttttgttctgtggcttgctcagggaagggatacacacttggggagaaaaagacttggattctagttgatgtttttctcctagctgactagggaattcagaacaagttactaagagctttctagtccttagttctctcatttggaaaatgaaaattttaaattagagattctatttctaaggcaccatgtatttcattttcttaataaaaagtatatatattcccctaaagaatactcataagaaaaaggtagagttaaaatttcccaaattatttaattcctggttgcccagtaaccattaaatttctcagcagtcaggcaagaaccacattcccaccttgagacaagatttaggcctttccaaacttaccctcgggctctgttccaagtttatttgtaagtcagttgcatacaatttggaatgaaatgtgttataaatggtggttaggtccctaagtcacagaatcttagttaaccctcagagtgcctgatatactgcaccatgtaaatagaaagcagctgtatgtttctatgggagcaaaaaacttttgtaggaaaaatggtagaaactcgtactgcaggtgttgattattcagcaaacttctctagataaggaggactgggaacttcatcattattggtctagttacattcctggtcactccctcatcccattgactggtcagtttccctccctgtggtccttgtgcaagggtttctgcctcaccccataccctctgctccttgcccggtatcatggttcttctgagggtactactgcccattcacccttgtgctaattaggattacactgggtaaggaaagacatttgttctgtagcggagaagcggggaaggccatcagaggctttgagtgtcagaaagatttggtcttgaatgcaggctctgggatgcaaccgtagggaagttaccaaacatttgtgagcctcattttatctttaacaaagctgataatacagaactcagggccttgtaaggactcgatggtatcaggtacacacgacatttgcccttgagtgctcagcgaatgttagtattccttctgccatcggcctgtcacttccgtttttctctttggctctacagggaatacttgcatacaaaaagagctgaagtaagagtcacctacatcttaggaaaaaagggctgctttaggtttatcctcaagtagttttgtccaggattctgaggagaataaaagctgggtcagatccagtgtgttgaaaagaaagctgaggtgagaagtgagagaaacagagaggcagagaaagggggaatgagccctgtctgctatgaagtaggaggcaatccaaaagacaaggaatccgtggtcattgccactgagaggagaaagaaggcaaactcactcctgtgacttcagggccatccatgaggtgggcagaggaactcagagtctgcccgattcttggattgaatcttcaaattggtaaagctttatatcaagcaactcccaaatgcagcatagttttgaggtgataaagaagagtcttttcaaggctgggcacaatagttcacgcctgtaatctcagcactttgggaggccaaggcaggcagatcacttgaggtcgggagttcgagaccagcctggccagcatggtgaaacctcatctctactaaaaatatgaaaattagctgggcgtggtggtgggcacctgtaataccagctacttgggaggctgaggcacaagcatcacttgaacccaggaggcagaggttgcagtgagccgagatcatgccactgcattccagcctgggcgagagaatgagactccgtctaaaaaaaataaaaataaaataaaaagagtattttcccggagtaccggtaatattggttccagattcaaatgtattgtccagatacacagagggtaaacaggaacgcttcaggcatcctttattaaaagcacctcagtctatgtcagagggccaggcagtccattatctaatgaaaatctcctaccattgatttattttatcataactgcagctgctaagtaattttgtttaaggaatgatttacatattagtgtcttcagcaggatctcatcattagcatctagtctccagaaaagttaacacataacagtgaaaagaaaacattctctatcacatgcttctgcatgcatgggcaatttgagtcataccacctgttcccctcttctgttatgctagagtatacaaaaagcagagatacgcatagtttactatgatcctagatgcttaaatatcttgaattgtgttctatcttggactcattattcatgcataaagactcaacagattctcttcttgcacctctcaaacagcaacatcaacaaaacccaaacaatgtatctttcctaatgaggtgaaagcatgcataccagcctaagacagaaatgttgcaaaaatgttttttgcaagaaggtcagtttgcttttcccatggtaactaaggttaatttctactgtggttcattttggcatccattttattcatgatgattattagagggcatggatattgggggtgtgttgatgttgggcaccagagaaatggaaagaggcagatggaggatgcaaatcattttcactcagaacctaaaatgtttactgttagataaagggtagagaagaatcttaatttgactgtcaaaacatatgattagttgaagttaccaaaactatttttttaaataacatttatcttaagagctataaataaagaggaaattttgcactagagatgaagttatgaacatttcattaactctaaagagttaatgaaaaactagttgattatatgtgttcatttataggttgacacgtgaatttccagagaagtaacttgtatgtttttaaattccaatccttatcttacatctgggcagaatcagacttgtgaacgtcccattccaaacaaatggctaaacactttgcagactttgtctagaagagtgccttacccatataagccctctgttataaaattgttttaaacgttaaattagctgtcaagctgttctgcatcagtggcaccacctggtagcaaggatggagatctctgccacccaagatctctttagtgctcacgtcatttctccaccgcaaggaggattgcgggggtggacgatgctccctatttagtcttctgcattttgttgcttacagttcaattaacatgtcagttagagatgacttttggttgcagttaataaaatatctgaccaattgtatcttaaacacagaggagttgatattttttgtagaacaagaagtctggaggcaggtagttgagagctatggaagagttccgtgatgtcatcagagacctgggccatggtttattctgctgtaccatttttaacgagtgactttggtcctgatggttccaagacgactgctgcttctcaggcaggaagaaagagaaaggacgttcagcctcagagtctctttgtctttccatttgggaagggaaatcctttcttgcagatatcttctcaagcattggccaaaactgtgtccacacagcttcccctggctggatcagggaattgagatcctccagcctttgtagcagagaaagaccaaggagaaagaatttgggaaggggtgttgagtgagccaacatacagttatctgccacaattaaatacagcggattcaccttgcaaataagcattctttttagaccatttattttctttctctctttgtcccaattcctttattccttaggaaagtcttgatatctttgtgaggtgtgtttcaaaaaagaagctccagctcaggttgtaaggagtaagcaaaaataataattccagtgattcagccatagaagtggaaaattatattatttgaagaaaaattagatgtaaaatcaatgtcatcgacagcttaaacctggtaaaagcaaggaagttcctttcagaatctaattttattccaaatacatttattgagcaccatcatttattgccctagatgccaaggataagtgaacacaacatgacctcttcagaagtctgcatttttctcatcttttttccctcaagtataagaatgaaaaataaagctatttctaattagttacatcagtcatttctatcagtattactatagattttatttttattgtatactggatatttaaactaaatttaagcctttgtgggcttagaaattactgtttcatgagtaacatggcttatgtaggaaatttccaatgccattaaccttaaaaatgttcattggaatactgcttatgtcatcttggaaactacctttgcggttgacatataaactgcacgatggtctattttcattatatgtttctgtatgtacataagcatcctcatgataaagattgtctacttgatcaaacttcagccagactcctgaaccttctcctaggcccacctgtgcacttctttgtaaaaatccagctgtagcgagaatcctgctaaatcagtttagcaagaaccaccttcctcttatgtatctgatcaggttcctcatcctccaccatcccccatgtgacgtctgatcaccctggcctgtgtcttcagcaaggttcctgttaagttttttttagctagaatcccccttacccccatgctttctcttagtagttttccatccaccaaaccccaccctgctccttggctatcaattcccacttgtccatgctgtattcagagttgagcccagttctatactgaggtctctttcccactattgcaatattcctgaataaaatctgtttttaccactttaccgtccatctctggtttttctttgacactcacataaccagagttttgtatgtgtgtgttgcttgacacatcacaaatacctgggatacgtgtactgattttttacagggtgaataatctttttgttttccccaatatcttagaaacctgaatctttaacccctgggcttagtacacagttaggcatataataggtgcttaagtaagcgtcaactgatgattttaaatgcagaagtaattgtcacttaatgaaatatagtcaggagactcatggattttggcctgtcttcctacctgttcttgtactgcaacagtaagtgtattaaggcaatatttttggcagcacaatcatttagtttgaatgcattagtaaaaggtggagtccaaagaattaatcgctggaaagttttgggaaaacccagtaacaactgtttccatagagtaatttgagtgacagccaggtaatagctacttattggagggactccacagtcagagccttgacagggacctgaaaaagagtgtaactgaagggtaaatgtaaaagcttttgggagaacaagggagtggtcaggctgaggcaaagatctgaaaagaaatgcctcctggggccaagctggtaatttgaatgactgaaggtgactgggtgggaactggggcaacctgaaaagcttctgttagggtaacagagcctccgttgcagctgactgttctatgagaatgtgagtctctattgtcaggtcttcaggttcttccagagaagcaagacaacgggaaatcaccagatttttaactaatggcgtatcattcaacaatttcaaaaaccattatgtgagcccaaactgaccaacgaatcaaacacacacacacacaaaaaaagagtctgcagactaaattcaaccagttggtgacctctggtctgtggttaccagagaagtaattgaaatggagttttgggagaaagatcatatgttgaaatcttgggagataagggcagagaaataagtaagccgagacggcggtaaggccaaggtagaaaaggtagcctttaggaaaattaagttaagactttttaaaacaggaaggggcaaaagatgaggttaaagcagatgaggaaatttactgttatttattttcatcattaaaatacgctttccacaaatttttcaactgtaagagagagtgataaattcaaaataggtaatgtcaaccatattatgaagagtatgtttttgcaatccaaaaaagctaaggcacaacattaaaaaaaaaaatctgtgaatttggctttgcaaaggtataagaattaagtcacatctgatcatttttagagtcttaccttttataacaaagaggaaaatttaattaaactggctctgccctggcgaatctgggatgtgtgttcacttatgaagagagactgttaagattcgttaattaatgaggttgagaatagagttgaaggagattggggtaaatttataagtttgtgtcattctgagagttctgtaagtagctgagttacccatgttgtgactgagaaaaacaggagagagcagtgactgaaggttctgagccaaaggaggagaatagtattgtttattccagcagccagagtggcctgtgtgactgtaagtcgcctgtcaagagggagactgcaaggaaagtgcattgatttgatttggagtagttgtaactgcagcatgaagaatatgatatatagggatgataattgaggaacaatttaatggctgcataccttgctgaagttgaagttccttctggagataaaggtggcaaaaaagaaagtgcttaggtagaagagctttttaaaatgagttaacagaaaacagcagactaaatatggaattgaggagtaggaaatgaaggaaatgaatttgaagatttactttctttcaggatgcagagctggtatgtaatccctctgtttccagtgccttctcccacttccaaatttcactgctcctcatgcgccctggtgtgtggtgcagcttcgagattaagcctccagccttctgtcaggatgaagcagcaggtggctgagatgctaggctccaagtgggggaggtgtttagggctctaaagactttcaaccagtccttgtattttcagccacatttcagtcttcagaggaacctggagcctttcatttctgagacttcttggctacataaactggcatgcgtcttgttagttcctcccactccctgccccaatctccttgtctccccaacatcattaattgagcttgggatttctctggtctcctaagttggttaccagcaggtcattttctaagccaccaaaatactggagctctgatctgttctcatctcctctcctgttttgttaattttcttttgggtaaatgccattttttattcctcttctatcaacctggtagagtttcagggataaagagagacaaatgagtctgctccatctgctgtgtttaactagaagtcccaacacccaaaatccttcacacgatgtgcagggctctgcagtgggcctccccctgcctacctgtcaggccttatctgtgcccactcttcctccttcctctctgagatttcagcaatattggccttctaaggattcttaaagccccaccttcttctctgcttcagagcttttttttttttttttttttttttttaacatgtgctgacctattacgctgctgtgttcttacctggcacgctcccatcatccttcaagtctttgcttcaatgtcaccttctccaagaagcctctcggacctatgtttccctatgtatacagtctcatcacttcctgtgtgtttccttcaccattttaccacagtacatatgaatatttgtttgttagtttgtttgagacggagttttgctcttgttgcccaggctggagtgcaacggcacaatctcggctcactgcagcctccacctcccaggttcaagcgattctcctgcctcagcctcccaggtagtagctgggattacaggtgcctgccgccgcatccagctaattttttgtatttttagtagagacggggtttcgccatgttggcccaggtggtctcgaacttctgacctcaggtgatctgcctgccttggcctcccaaaggctgggattacaggcgcgagccaccgcacctggcctacatatgaatatttgattattatccatctccttcgctacactgcaaagtcaataaaggcagagatttattttggttaccagtgtattccatgtacttggcatggttcttggcttatagtacatgcacaataaatattgaaaggatagatgaaaggattatggatagatgaatgtcttttaagcagttataaaacagttctgcctaaagagtcttttttaatcagtagtattacttcaaatacatatttaaatacacatatgttataaatatataaaatatgtatttaaatatgtcatttgtactattttaaatgtatttaaaataatatatgttatatattaaaataatactaatgatttttaaaagatcaggcaacactgctttgtagctttttagaagacatttatccttatggatccataattattatggattgtatgttttatatataatgaaggttttgggagttagagccctgatccttccgctcttgaagcttgatttaaaggagcatggcacagtggtgcctatatgagtcagccctccattatctggggcagaattcaggccccagaaatggtacttaagatacacagttctcccccagaaaactttatatcggccatttgttacagaaactgctttctcaacaaaccttttaccagggcagctaacaatgagcaaaactaatttgaatttcaactctgccattattacagtgttgctaagaagtagtgagattctgctgaggaaggccaagcaagaggagggagccagaaatgccttaaacaatccacagccaggattttgtgctatcttttatttcacagttgaacttctcagtattttttggttcataacctttttctcttttcctcaattctgagtcttccacatttgtgccatactaggtactttattgcttctctcccttttttttttttcttgagatggagtctcattctgtcgcccaggctgaagtgcagtggtgcgatctcagctcactacaacctccacctcctgggttcaagcaattatcctgcttcagcctcctgagtagctaggattacaggtgtgcaccaccatgcctggctaatttttttgtgtttttaatagagacggggtttcaccatgttggccaggctgctctcgaactcctgacctcgtgatccgcccgcctcgacctccataagtgctgggattacaggtgtgagccaccacacctggccctctccttcatttcttagaagagttttacaaagtcattggtgataaataagtaataccatttcacatctggaaacataacttgatagtaattataaattcacagactgtactttctgtacttatctaagtatgaatgcataattcctgtttatctgtgtgtaggtttatttttcccccatttaagtaaagctctatgttgatgatgaggtttttacgagttgagattttaagaggcctcaaatatatctaaaaaattatagaccaagtatgatgtgttagtgttcctcttctctcagctaattctttaaagatatgttccagaattcctggtctgttcttgaagatctcccaataattctagacttctgaagcctggatattttggcttaatttgctttcaagacagactggatttaaattactcaatttgtctgaagtctcattaagatccaaggttcttgtctgttctagtgagtttgagctggcaagaataatacttgtcatctgaaaagtccattagaatcctttggaggagtgagactggaaaattggagacatattattatattttaaaatatgccacctttctataataggagtatgtggggagactgccttgttttggcttcttgggaaaatttggaaaattagtaaaataggcaggcagtagtagttcaatgcgtattgtatgccaaacactgaatttagaacaatactcccccaaaagcatatgtgctctaaattttatttttcacttaccacctgggagatttggattaaatttcttctgggaaatagagttggtatgaagaaacaaagaccactataccaatttatctgttggaataatcatttagccgtacagctctttccactcataaagttaatgaggtcattattgttctttctagctaatagataggcatattgaaaccttaggcctttccaaaaagtctccataagccattggaaagatagactaaaacactccttgttttaaattctagacctcagttcagtcagagatagtaggatttttgcagtattattaaaaagacagaaaccagctataaaattgaaatgaagggacttaatgttttttttctgtaatatctttggaatgcttccatggctttaaaatgctgaggtgtttctcactatttttcaaaagcatgtaacatgtagatatgtgacgcaaacttgaccagttgttcctcttttctggtgaattttgacacctgctactattacacagagtaaaagtgaaagtcataaaacagaaatacttaccaaagtcaagaaaaatgcatagactaaacaaaggggcaagagaagcctattacttgtttcatgtttcaaaataaaagatgaatggcctatcacttcagtagttggaaattcaacttgagaaggtaggtggtttgatgtttgcccttgttccttacgtttctagatttctctatttataggctagaaccagccctggataaaataatacaagttatgaagagaaatgtgcagttcagcatttttacccttctgaagtgcgctttctcccagctgccatggaaacatggcgtaactggtttcttggatagtctcactcctcttgagttccggctgtgagagctagtgagctcattacaacttggatcagagtcctggaaagtcagctcccagggaaagtggaggacagtctctcatggggcacgggaatggggggctttagctttattaaactgcatacatactttcactacacagtcatcccaagctttagcccaggacagtgtcacattgttcacagctgtattgcatcttgaggtttctgtgtgcatcctacacactttcctaaggcagagacttatctcttccagctgtaagccggagggagtggtgctgcagactcctagcaacacatgcggactcaaacaacacaggcagttaactctcttgagtagtagacttgtagggcaccagaactccgttgcagttcactgacagttaccagatatacatttgtatggcttccgtagcattgtgatggaagctaaacgtttgccctgctactttcttttttttttttttttatttttttattttttttttattatactttaagttttagggtacatgtgcacattgtgcaggttagttacatatgtatacatgtgccatgctggtgcgctgcacccactaactcgtcatctagcattaggtatatcacccagtgctatcccccccactccccccaccccaccacagtccccagagtgtgatattccccttcctgtgtccatgtgatctcattgttcaattcccacctatgagtgagaatatgcggtgtttggttttttgttcttgcgatagtttactgagaatgatgatttccaatttcatccatgtccctacaaaggacatgaactcatccttttttatggctgcatagtattccatggtgtatatgtgccacattttcttaatccagtctatcattgttggacatttgggttggttccaagtctttgctattgtgaataatgccacaatgtgaaggacctcttcaaggagaactacaaaccactgctcaaggaaataaaagaggatacaaacaaatggaagaacattccatgctcatgggtaggaagaatcaatatcgtgaaaatggtcatactgcccaaggtaatttacagattcaatgccatccccatcaagctaccaatgactttcttcacagaattggaaaaaactactttaaagttcatatggaaccaaaaaagagcccgcattgccaagtcagtcctaagccaaaagaacaaagctggaggcattccctgctactttcttctggtatgcctgaatcactgtttgagaatggattggactttggtgcgtggaaaactggtagcagaaggcttattcactgcagtgggttgggggtaggctgaaaagatgtcagggaggattaactagaggcagaatgtgtcatagttagaagtatttagaagggaagaaagtttgaactctgatactgttccacactaatattcatgccctgaaagaatcagatcattcttgcctctcccacttggatctctagctactggaatttgccaattcttgatatgaacgctaagatttggatggagcttgtgacctcatttagaccatttgttctaaatgctgaatagaaccaggaaaataggaaaagagggtagaattggggtcataagagaggaatcgtcgttctttgaaagaagaaagatgataggaaactaggcacatgagttacgaggcagtggagaaggaggattagaaagggaaaaaaagaagagaaactttatgccaatatcttctacaagatgtttggctggcacaaaactaacactcaatacttttgcataagtaaaggaatgagagaaaatttgggattggatgcttatcccctggaaactgctacaggctggtgttaatgggaaagggatctgtatttgaccaaaagtgcatttccacgtctctacatttctttttataaagagtcaaagggactcaatgatgagtgtgtgtgtaagggaactccacactagcaagtacaggaaaaatttgatggtactggtgaaggatgttgcaccaatctggaggggaggacaggaattggtttctcatggattgatgccgcaagacaattcataccatgagttggctgagaccacttaaaaaagtaagcagtgatgactgggcaaaagagacaaaggaagaaccacatcttttaggggagagagagagaaggacaattaaagggactcaactagatcaagttctgctcactaaaggacagcgtccaggcaaatgttaattatcttcaagaagcaatctgtatatatagcatttcaagatactccgagatgcttttaatttattgaatactttttattggtatttatcataaacaagagactcacaaatatatcccagaggggaggttttggtgtagttgactatagtagttattaaataatctattaataaaagcccacaaaatggaagatagaaagatagaaaaacaaaagacaacacaggatggtgttggtatacagaatttatacttgaagtttaacaacacggaacaagaaactttattaaaatattcatttaaagaacttccatatgaatcaccagaggctcttagtaaaatattgattcggattcacagatctgggtggggcctgagattctgcatttctcataagctccaagcagatactgatgctattcttcctcaaatcacactttgactaacaaggactcacacaggttctctgtaattggtgttggtagtcattcatggttagatgtagttgaggactgccctcttaactacctctcggctgccaggttataaagaaagcaagtctcagtacaagttctgtcacttaggagcatttattagccaatgggtacaaaacaatcttacagcctgtgccagagacacagtgaagtcacagttctgtcttttggggtgcttggtgtgagaggctcacagtctacacaggccacagtcctctattagagtggttctcaaagtgtggtccctggaccagcagcatcagcatcacctggaaacttgctagaaattcagattcccaggcccttcccatacctactgaattagaaaatctggaggtggggcctaggaaatctgcatctttaaactatccactccaggtgattctgatgtttgctcaagtctgaaaaccattgttctagcagcaggattccctcaaccatctaactgaattctggcaactaagaatccggtgaaccacagctggacattttggaattcagcctagggcaccatttctaaagatggagaacctactggattcttcttaaactcaatttaaaggcagggagtgtttctaaatgtttttcaacaatcttcatattttgcaaaccactaatatcactacacaggcccgtctaactattaattaggaaaattaatgaaacccctggtgtaataagagctaaatataactgaatcacttacagtggccgcctgtggcatgaggctttttgattaattgctagccaaccacccttggagttcactcctgattaagacaactgaccacctctacagtgtagcttaagctaacacacacatacatcagagtgtactgttcatgtgagggtttttaaagactcttaaaatttaccttatcagggcataatttaaacactataacatgtttccattttaagtgttcaggttagattttggcaaatgtatacactcgtgtaaccaccatgccaatcaagatataacatttcgatcacctagaaaacacccttgtgttcctttgaggtcagttacctactcccaccacaccccaggctaccatctggcatagtagctaagttttgcctgttctagaagttgatataagtgaaatcaaacagtatgtactgttttgtgcctggcttcttttacccagcttagtgtttttcagatcagttcacattgttgcattatcagtagttagttcctttttattgcactttgcacagtagtatcccactgaatgactttaccacaacttgtttatccattaccttactggttggtttccggtttttgactattatgaataaagctgctatggatattcatgtacacatctttttgtggacatacatttttttttattctgtgcaaatatccaggaaaagaatatttgagtcataatatacatgtgtgtttaatttcataagaaactgcctaactggtttcccaaagttgtcgtacattcccaacaagcagtgtctgagaattccagtcgctccatatcctcaccaacatttggtattccggtcttttaaacaaaattgtatgctgaatagtttaaattacagacattgttttctttcccctagttgaaattcaggcttttatgtttggtctctgcgatggccataaagctgaaaatgttgacccaagtgacttggatatggattgaattattgccctttcctaacacctcatcagaattggtttcgtaggtgtcatttgattatggcagtcatgtatgtcagtgtactttttctttctttcattcttttgtttattgattcagttggtcagtcggtccatgatctgtattaaaacagctttttcagagggcagttgcatattaagttgctaggaaaaatgacagaagtaggtgacagagttcttgtcttcaaggagctttttggagctgagttcctgaaataaatgtagcccagtatctatcaaggcttgtgcagacttgagtaagaacatcatctaaatatagcttcctgctaggtggcgtgagtcagggcttgatagaccggtgactgcagaaaccacagtaacatatattgttgttattctgtgctgaacattagaatgattgtaccttagaatatagagccaaatgtttattttattcctaattatatttttaaatacatatcacacacatagacacatatgttggataaaaaatactcaaaatgttaacagtgcttatttaaaaggtttatataaactttttttgtagagatgggatctcactatgttgcccaagctggtcttaagctcctggcctcaagcagtcctcccaccttggcctctcaaagcgttgggattacaggcatgagccactgaatccagccagttgtgcctatttttgagtttatgggcttgtggatgatttatttgattatatatgtatatgttaaatgtctaagttacccaaagtgagcatgtataacttctacagtcagaaaaaatgttatattgccacttgattgtttaaggtcttatagctatttaaataatgtatttcttgttctctttaatcttgtgcagaaaagattcactacagtagatccagattactttctagaaaaaaataatgcctgtccatctctttcctcttgggaacaggactacatgaatgcccttcaggctataccactttagtcttcacagaacttagccttcctggttgtcaaagggcaaaaggaattattttttcttttccccacgttaacagaattttcacctccgaaagcttggcgtatacacactatatgttttctaggctatttttgtggtggttgtagttattggcaaatcactgggcgtcgggggtgggttgtctgttatttctgatggaataacaaatgctctttgttttccctcttttcagctgacctgaataatgtcagattctcagcttataggactgccatgaaactccgaagactgcagaaggccctttgctgtaagtattggccagtatttgaagatcttgatactatgtctttgcttagaataaaaagtaggttgggtacatttttacttagagaggggagaaacagctgtcacaattcctgttgcaatgtataattcattctttaatgtatccttggcctagagtttgcctagaatgttttgttttatttttagaatcattcctgtcaccattcctcagctactgatgttgaattaagatattgagaatttttattttccaactactggcattggcatcggcatccataattacctttgtgaaacttgcacaatccttgttctacctttgtttttttttctttttacaaaatgtacttagtattagaagactatgactatctgatctaaaccaaacttcatagacatgtgtggtttattagcttgaatgctaacgtgcagatgaatgaagtggtagaggaaaaatgacagaattgctttcctccttttttatcatacatctgtggaaaaatcctgaagtgttacacagctctatcatgtcatcaaatagtttatgtataactctactattgtctgagggtctgtgtgcattgatgatatgcccatgaaacaggcacagtttctttttctttttttctgtttttttttttttttttttttttttgagatggagtcttgctctgttgcccaggctggagtgcagtggagtggcgcaatatgggctcactgcaacctccacctcccaggttcaagtgattctcctgcgtcagcctcccaggtagctgggattacaggcatgccccaccatgcccggctaatttttgttttttgtttgtttgtttgtttgttttgtttttttttgagacagagtctcgctctgtcaccctggctggagtgcagtggcgcgttctaggctcactgcagactccacctcccgggttcacgccattctcctggctcagcctccggagtagctgggactacaggcacccaccaccacgcctggctaattttgtttttgtaattttagtagaggcggggtttcaccgtgttagccaggatggtctcgatctcctgaccttgtgatccgccctcctcggcctcccaaagtgctgggattacaggcatgagccaccacgcccggcctaatttttgtattttttaatagagacggggtttcaccatgttggtcaggctggtctcgaactcctgacctcaggtgattcacccgcctcagcctcccaaagtgctgggattacaggcgtgagccaatgcgcccggcccaacaggcacagtttctgctctgatggaacttacagtctaacaagggataaccaggatgttcatgaaatttgtagacataagcaaatatatgtataatgtattaagaatgtctacagttggttaaaaaaataaagtgatcttgtctctatttccaagaccatttcaatgtcatatatttagttgtgcaacagtgggacaatggggtactatgtgaacagctaactgtgtggaatgagattcaaagaatgtttgtttgaagaggtgatgtctaagctaggtaactctagaagagtaagcagctctctctctaggaagagcgttctagtcagaaagaagagcatgtgctgaagggcccagagaaagcatgacacattcaggaactgaaaatatgtcagtatggctaaagcacagaattccaggggaaagatctattgtgaaataataggctggagagagaagcaggaagcagattgtgcaaggtttttaaaacccaagttaaggaatttagaggtcaggggatttggcctgggggtgacataatcagattgtcgcttagaaagatgattcttgctgtggaacagagtatggattggtgcgatgtgggagtgacaggagaaaaacctgttgcagtaatctaaaccagcaatgtggtggcttgaattagcagagtagtaagggagataagtggagagaatttagaaatatttaggaagtggatttgacaggcctcagtgattcatttgatgtggtgcagggatgtccaatcttttggcttctccgggccacagtggaagaagaattgtcttggaccccacataaaatacactaacgctaacggtagctgatgagctaaaaaaaaaaaaaaaaaaaaaaaaatcgcaaaaaaaaaaaaaaatgttttaggaaagtttacgaattcatttgggcctcattcaaagccatcctgggccacaggttggacaagcttgatgtggtgggtgaaagggagtcaaggaagacacttaggtgcttggcttggaatatcaggtgaatgtgggacttgtctggtaaggttagacacggagctgtggtgctcaggagaaatatacaaacaacgtttagggatcatgagcctgtaggtgctgcttgtaacgggggagaggattggatagctccaggaaagtgtagcgtgagaagggaagttatttaggacacaggataagcaacctacagaagggactgcaaaggaatggccaggaggaaagaaggaaaattccaagaggttatgatgccacatgctccatgggaagaaagaaagaacccgttaccagggtcagatgttgctgggatgtcagcataaagttgcggaaaatgcccattggacttagcaacaggaaggtccctagtaactttggtgagattttagaggcacagtggaagtggtgtggtgagttcaaaagtgaaccaaaagtggagaattagagaaggtatgaatgattcttggagaaatttacttatgaaggggagaagagtggggtggtagctagttggagggggctgaggagttaatggaaatgtatgtacagtcacgtgttgcttaacaatggggatatgttctaagaaatgtgttgttaggcaactttgttgttatgtcaatataggagagtactacacaaacttagatggtatagcctagtacacacctaggctgtatgggatagcctattgctcctaggctatacacctgtacagcacgtgactgttctgaatactgtaggcagttggaacacaatagtaagtattgtgtatcgaaacgtatttaaacatagaaagatacagtaaaaatatataatagtgtaatctcatgggctcgctgtcatataggcagtccattgttgactgaaatgtcattatgtggcacaatatgtgtatataagtgtgtgtgtgtgtgtgtgtgtgtatacattgatccttgaacaacatgggtttgaactgcttgggtcaacttacgtggatttttttcaatcaaatgcaggccaaacatatagtattcgtgggaatgtatttatatgagtatgagaagacagggtgagattacaattattggcccaagaggagatgataaataatgggtgttctcagagaatacgggcaggtaatccagagcccaagggagggaagagatacctctcttccactgtaatgggtggggtagagggaaggatctgggcaggtccaggtaactaagaaaccaggtagcagcaaggtgaaggatgtcttactataaaggcttccattttttgtatggagtggagagtccctgcaacgcagttaacagcaggagatgatgaagttgggcttatctttgtggagaataagagagagggcggagttgaaaaccagctgtgtgaacccagaggcggctgagtgtttcacggtagctccaatctgcaggggtgtggtatttccccaggcacgcttagcacttgggagccagatgcttctgtcctggggtagggagggaacagctgggcaagagaagtgaggatttgggcaaaagattgattaaaatgatactgacaagtccctgttgggtaggagaagctgtgaacgcatatggaaactggtaattaggaggtagagggatgaaaatgctaactcttcagggaggtaggggaagaagtagtaaaggaactgaaggtcaagaagttgtggtcagagagaatcatagatgaacattattttgaaggtggaacagtttcaggtgattagatctaggatatagccatttgagtaggtggcagaggtagagtggatgtgaatttccatggaggtgaaatagcaagttaaggaactgagaggctagaatgatgcatgagtcccccatgccaatgttgaaatcatgcagaattggagcgagaactgggcaaaagagaaggaccgtgaaccctggctgccaggtcttcagaaataaaggggttcaaccagaggatctgcagaggctagcaataagatagtcaaggagtcacttggcatatggttcttacacagagatagagaagaaatgccttagaagtggaattatttggaaagagagactaggccttttcccttcatcttggtatccccaatgcttagtacaaaacctggcacacagcatggttcaatatgttttcatgagatgaatgcatgaatgaaagtaaaccaaggcttccatttccttatagcccgaagttatcatttttcagctatatagttgccaagtttaactggtgtttaaagggctttccaggtcgagggtttccttaggacctgttaatacgtcatagctgggaaaaagtagtttgggatgggatcgagtcagggggctgaatagagaaagttttcttgcctctttttcttcacctgcccctgcccctgcccctgccccatcccagagctactgctttcctttaataaaggagtaattaggcactggttatcatgaagtgctagagaatattcctgtgagatcctaaaagttcagaagctaaccatttgttccagtttatactatggaaaaaaaaaaaaaagaaacccagaaatagaccagatggaaaaaccttataatgactgttcctttctataatgtccattttcaccctggatttaggcattattcgattttcctgctcaaaaaaaattccattcacatatgtgttttattgtctgtcatttcaacttataatttccaataaactttgggaaaatgggggaatttcataatatacaaaattttgtccatttgaggtgataaccttgtaataaaggtaagctccgaatgtagaataatttctttaaattttcacttttaaatcaatttgaaattctctgcatttcctttctgagcatggcttttctaatatgtgaaaaagattcaagtatgccaaaattaaggtgtatgtatctaaattaagtattgaattctcattaatgctaggagggtgccatatatagtaaaactatagaatgaagagttcaccccatccttttattgaacatatgtgtggtcacattacttactttcaatatatgatttaagaattttctcctaattttatatttgcttagatttagcttccaggcttttgtcatttctaagcctgcaaagccatgataaagagctattgtctgcggtacaggcaaataaaacttgccctggctagctttccctaccaaaggccacttctaccaactctaactttaaggaaaattaatgatgttatctcagtgatttcctggtgccagtgaagagtttgaattacagatgccttggaaatatgcacttccacctctattaagcacttgatcttatttttttttcacttccctatcaatgtttccgtattgcagaaagccaaataacccaattgtatccactatagagaattcactatttaagtggagagcatcaccgttggcctataatgtccccagtttgtaatcagttaagtgttgcatgactccttactgcctctcaacacattggaaatgaaaatgaaacttggtagaaaagcaggaacaaagataaaatcttggtaagaaggatttataaactgtttcatatagctgatactccattgaaagttatgaagaaggtaatttaagcattttctttctccctttgtagttctgatgacattctacaggtgtgaggcttctaaaattaaaaagccaacttgtaagagcagaaataaaaacgcacttaacaaagcaagtgtatttagtttattaataatgtgtggtgggttggagagagcccaaaccatagggctaaatatactgcagttgataagtgtgacaaatattctgcaaacagtaagaaatagagaacattttgcctctattcagcaactaaagcacacattatagagatttggtacaggctggagttgtgtgaatagtcacagtttctggactcgccctcaccatgacaaaccaggtgaaaaatgcaccgccttctctgtaaatgcacctcaccttttgatggtgcgctaagggtgacattagataggcttcagttgctaaagaagactctcaggacccacaataacatggcttacaaatccgcgctctattgccagaaaaggctacattacaagagcattactgtcaggatatggatccacagccacaggctgcctccacagcaagggggtctcgagaggccagtgtaattattttgccactgtcctacaaaaatctactttttctatataccatgtattatttttcacataggttagaggccatgtctctgttagttctgagtttaagacgtcttgaggacatggccaaactaattttctcagtttatatggtttgacagatattagtgcccaagagaggtctcataacatgacccatctatctcccaggggaaatactgtaatcttgtttagctgttacccactagggaaagaatggttttctctcagtcagatgctaaagagattaaagaacacctcgtaggttccgttttctagtaattattggttccattctccagctatcaaccttggcagcttgccatccctatccttcctcctggaattggatgcccttgaagtgcgcttcttgcactaggaagtctttctcgtcagtttatcatttctcattcaaagcaaattctacctggccaggtatctctagcccagttcctaattctcctaatagaagtttcttttatttcaagtggattcatgccccttggcccaccagacatgttgccattgagaaatagcagctttaatgggaaatacacatgagacacaaaaatgtgactaggctaaaatcatatgaatagtagtcactcctaaaaggactttggtttgggtatgtcacagaaatttctgtagccatccatatccaatttctagcttttcagtctcaggaaagtaggcccaccaaattcaacttaaatatctgtcactgattcaagctgtcccaattgtccctccacccactaatggctttccacacggagtaatggggcaaatagctatttttttaaacacataatgttatgacagatgaaacatacagcacgtaagccttctatcacatgcccaatacctttgttaaaccttcatcatcacaattgatggccacacagtgtttattgagattgttataaatcattgttcttcagatttgactgggtaaatattccctcaggttatttcctgacacagctgattaataacagatatgtcctgtgaaagaagaaccaaaagacattaacgaatactaaccaaaagccacattaatattgctccatggtgttgtagtcgcagttagaacgcccatctcgtcatccagtgtgttggataggttggctgactctcccactcacatcttggctctttcaaggaggaggaggttttagcagagtcccccaccccaagaggcatctgagtctaagccaagggagcatattattctcttattttaaacctctccgtaggcagcaacattatattaggttttccctttaaaaaaaaaaaaaagtatcggctgggctcggtggctcacgcctgtaatcccagcacttcgggaggccgaggcaggcagatcacgaggtcaggagttcgaggccatcctggctaacacggtgaaaccccatctctactaaaaatacaaaaaattagccaggcgtgatggcgagcgactgtagtcccagctactcgggagtctgaggcaggagaatggcgtgaacctgggaggcggagcttgcagcgagccgagatcgcgccactgtcctccagcctgggtgacagagcaagactcggtctcaaaaaaaaaaaaaaaaaaaaaagaaaaaagaaataaaaaagtatctttggtggtttccttccccttgcaacaatctcacctttttccttttatcattaattttaagccaaacctcttccccagctacacacacacaccacacaatgcagacagtccccaacttgtgaagtttcaacttaacaattttttgatttcacagtgatgcaaagtgatatgcattcaatagaaactctacttctagatttgaattttgatcttttccaaggctagtaatatgcggtatgatactctctccccttgctgggcagcagcactgaacctcagctcccagtcagccacaagatcatgaggctaaacaactgacactttactgtgtaaggtgttgctagacagttttgcccaactgtaggccgatgtaagtgttgggagcacattgaaggtaggctaggctaagctgtgagtttcagttagttaggtgtattaaatgcatttgtgacttaagatattttcaacctatgatggggttgtgtgatagcttcaattaggcaaggcacaaggaaggagtaatccattccattgatccttgtggaatgcttgtgcttaagtaccaactaatagccatagtatcttattttggaatattaccagcctttgaaactcttaattgtagccccagttcagggactactaggtctggcatcaaaaaagaaacctgtagtgacatagggaatacctgtaagtgccccacttgaattatctttttaattgtaactggtctcacaggtgtagcccatttctcaaaaatgatagttgcttcagctttttggttgggactccacctgcaggccagagagggtgaagcccagtggaaagaaattctgaacttaacattagcttttggatttttttttagcagccttgccatcagtttgcaattgcctcctaatccattttgttagctccttaggttcaagttctctcacttccagattccactagaaagttacaccatcagtaaccaatttcaaagcctgtgttacttttcaaccaagcgtagcttgttgagcaacttcaaaggttctttttcatcccttttatcagaatcttctttttttctttctaaataatgcctcagtcatacttttagctaagaatgagttggaggtgttctaaacaatcttgcttctgacactcactgccctgacagtggaagttaaacagggttcaattgctaaagaggactcacaggaaccaaatgacagtgcttacgaatctagagttccttgcagaaaaaggatgcaatatacccacaacattaaaacaagaataagtgtcacagccacagcctgcctcacagcatagggtccagagaggacaggtgcaagctataattgccctctgtctgcaagagccacaccacgatgcattttctctcttggaacaagagctactgatgtgagcacagaacaccttggaaaccagggagcacaaattggagtttcagccagggtttcttatatcccgtgggtaacctaggcatactgttcctatgtaaccagcctcaaactcagtggcttccgttggtctgactgtgcccgggtaaaaatggtcaatgttactgttagcaataaacaatggtgataacctgcaacccatggctacacttcaacacagtaagtcactttgaaaagcaagtgctttgaccagggctctgcactgtgtagatattttagcaagtcatctcgtgccaactccagcctctctggaattaacccttactgcacagacaactacatcaaagtgcattgactttcttgaagtgcaaagatttgcttgggaggtccctcagccataagtgtaagttgcctgtagagtggcatgcctgggcaagaaaaatcagcaaacatacagcagttcttccaccattactcacctctttctgtttctgtgctaattagatcacagaattatttatacatcaacatagaatatacagattgacctataggatgaacttggggttatatgggcaccatgagactttttttttctccactaaccaactttttggtgcttctgttttatcctactgttgtcattagcatggaatgcagaatggttttcctgttctgtaaagtcagtaaggacaccttctgccacccacttttcccccttacaatatgtacctccatgagaaatcagaaaacctagatatcctgccataacacccagagtgagtctccatatctctggtctcagttgtctcaactgcaaaatgattttaaagcaaccttctggctctaagagtctatcactctgtaaaagacaaaaaaaatctgtcttacataggaaggaatagcaagagttagctactgtggcatacatagaaaggaaaagaatgagcttttgaagctagaaggttgagaagatgattaggcacaaccagagcctcaggaaccattagtgggatccctgtgttgaagtcctgcctgctcgccgccccccaaccgccactgtctgcttttcctgcacagcaaagaggatcctggagagtcagccatttcttttatcctgtccccaccctctctcacccccacagccctcatgcatagggtaccaccacatggtccctgttcttcaatggcttcaaagcctatagcatcctctactgtaaacataatttagaaagtgaagatgtattagaatacttgggtttttatgtagctttaaagatatatctactagtgaatacacacaaacacacacacacacacacacacatacacacacacatatatatatatatatatataatatatttaatggaaattcctagcttaaggaaacaatggtttcacacaactgtatctgctggttgcttattgagggtcctagaaagagctaatcattacatttaatgtttcatcaaaaagtctaggtgtgttctctaagatgctcattttgaaaagcatatgcatggcaattaaattgtccctattgatattctcacctccttttcgggtccatagcatggattgtgtatacctaaatggaaattttttcaaaatagctccatgaaagttgaattctgtttgacatgtttgtttagggaaatgtgctcttcagtcttctgtgatggattgttcttgtgtttaaccacatccagttttagcagagcacactgcacagtatttctctcctaactgtgtcatcttctgctcctgtaatttcagagcaattgctttgctcccctctggagctatttctactcaacatttgctgttctatgtgttacccattcacctgtacagagataagagcaggccccataaaatgaaatgcatgcagtttttctctgttcatttccatcacacggctaaataagactcttaatacaaaagtgattcgaaaaattttcactagttacttcttaaatgcctggatcagaggcaaaatatttatgatgactaaagcagagtaacaaaaaagaaaataattgaaaaacttcaaaccacccatagcttccttcagtatataaggaaacatgttgggaatattggtgtttggaagaaatccattcctctcttccagtaatggagctggcataccgtgtttctaagtgttcctactacgtgcacttgagtatgtgccctctgaggaaaacaagcacacagaagagagagagaagaaaagtttgagtcttttgtctctggacctcgctccagcctcccacgcagtcttctttcagccattccctcctcacgtcctcccgtcctcctgcctccttgcattgctttttaaaattctttattatttttctcacttgattcttcagataagtctcccaagttatcttccttcctcccactttaaagaaagtctcagcttccatgaaaagggtcatttctctatctttagagtatttcagagcaaaaacagaggggccttcccttccaagggaggagtgcagactcctgcttccaccaccatgtctgtttcatgcttctggggaaactccaggattttctgttttcctttttttaaaagagaaaaatgtgtgcgcaatataggtggaaaagtatttttgcacaaacctacataggtattaaccactatttttgtttttttcttaatatttaattagaactggccatgaataacttgtaaaatatactaaagccttaagtttgcatttctttattactgggaaaggtgtttactgagcgggatttacctctatttatgtgaactacatttataattgaattgccccttccccctagatgcatgagagatttacttaattagcattgattccttgcctcaaaggactgagaattccaaccagagcttaggtgtataaggtagtataaaagcaatgttgttgtgtttctagtttggctaataaattggctttagagaaatgcatcttttcatgacacttgggaataaagcttgtgatttgctgatgttggacaaggttgaagtttcacttttgttaaatttttgtccccagcataagattaaacacctcctcagatcaagggaattttcctccctcagccttataaagttgttagaggacttagaaagaatattatgaaatacaatttgaaggtgaaaggagaaataagcgagcctcaggtctgaaaactggatagattatgcaattactttagtttgcctatagaaaattttagtggagagtatttttttcacctaatattagggtagcagagagatgctgaggtgactgatatttcaaggagaaaagcgcttaatgattataaatgcatagctagaaatagagtttacacaaccttagccatacagattaatctaacagatcttctctaatgctaatacaagaaagtatcatcggatctctttaaaaatttctgctaaaacattttttttttcttattcaggtgacaattgactctgtttatgtagaacaggctaggtccccttaactctcagatattccccagtaatccaaggatgggaattatatctttgcccatatcttcacccaatgccagtgagatttaagaacaacttcagatcctgaatactgatcaaactcatcaacttagagtcgaggcataaaaataaaacacctttcaaagagagtgtggttcacgtttggtgtttattaaagggtatgagagagtcctagctaggattctcagaggaaaaaggacactgaaaggaaggttttactctttgagtcatttgtgattttatttgttttttgcagtggatctcttgagcctgtcagctgcatgtgatgccttggaccagcacaacctcaagcaaaatgaccagcccatggatatcctgcagattattaattgtttgaccactatttatgaccgcctggagcaagagcacaacaatttggtcaacgtccctctctgcgtggatatgtgtctgaactggctgctgaatgtttatgatacgtacgtatggcatgtttttatttcccgggctctgtcacaggaggcttagcgtacagaatggtgaagtgtaattagcattacaacagggccctggaagctgtggacctaatgctcttcctgtgataaatcatttttgcatttatgacttgaaaaatattttgataagctaggagttaagagccagaatgtagattgctctcagattagaaaacaaacaaaaccctgagacactcattttgcaaatagtggaatgagtcgacatatagcctttggttctttccctttctcgcccatggattttggaattcttccatgcacttcaggggtggcttcctctcactggcggccatggctgtgctcctggagatactggcacacctgtctccagatcagaatggtcttagctgatacttaggacacttttgcagaagattatgaattgataggccaaacaaaatgaaaacaagcccttaatacagcaaacttagcttctcaaactgagaacatttttcgttttcttttgttttttaataagattttatgaagtttcagtttggcgcctccattcatcactctctcttagagaacaattgtttgttttggattgcacacaagggagatatccccagttctgatttttttttttcttgagcttaatgaagacaattgaagaagggagcagaaggaattggtcttaattttgcctaaattcttcttagatctcaaaattattacatgcctcatttcaccaatcaagaacatactcccatttggaaatctgggaaggttttctgaaaagagttgcaaaacaactgttttgccttttacctttgttgtagacttctactaccttttgaactaaaatttatacctttttttctttcttattttgataaggtattgctttttaaaatttcaggaccacctgactattacattcatcatagtcatctaccaagtccttgaacatgtcggatttcaattgtgaactacgttcacattagttttgataagagtttgtattcaggtttcccctcaaatatattttggcactgttttctttgcagatgacatgtgaatgcattctgaatgtataacttccttctacctgactgaaaagtatttggtgacaattttaactccttgaagacctgagttgctgtataaagtggatttgttaaattttgatctaccttttcttaagagggagaaagataagaaaattttccagtgataggaatttgtttagtccattagtgcccaggatttctttttgactgagggatttaataaattttagtagctggaagttgagcatattgttcaccgaaaataaccgccattgggacctatcctttgtgattttgaagtgctaataggcgaattattctgaaatattttctcctttttctttttaccaatatctaagggccagtagctttccgtaataaaataagaagccaaaaaactattgaaagacactttttaactttaattttaggtttcggggtattatgtgaaggtctgttacataggtaaactcacgtcacgggggtttgttgtacagattatttcatcactcaggtattaacccatttatgcctagtgttccattattggaacactaagcttgtgggaattattcctatcctactgctcaaggtcatcgccaaggtctgattttcacaaaaagtaatatgcagcctccagcataaatgggttaagcgcagtacccaacagttgtcttttctgctcctctccctccttccaccctccaccctcaagaccccagtatctgttgttcccttgtgttcgtgagctctcatcatttagcttccacttagaagtgagaacatgcagtatttacttttctgtttctgcattagtttgctaaggataatagtctccagctaatccgtgttcaaaagacatgatctcattcttttttatagctgcatggtattccatagtgtatatgtaccatatttctcattgatgggcattcatattgattccatgtcttgaaagacattttctacaaaatggaaaacttttcattcttatttttcctttttttcccccatggataaaattagcttattaataaatttgttatgtgaaatgctttatttcagttttctatatgcaaatatagaaaatgctatgcaaataaaagcaatctatattaaaacactgatatagcaacaggttatttataaatttattttttagatcatatatttgaatgttgtttaatagagtatgatatttttcttacggagataaacatttatattctatattatgtgttatgtggcctgaagtaattaattttctttcaataaggggcaatctgatgaagatctgagcatttaagagggctgagcagttagttgctggtaatttttttggcttccatgaccaaagtaggtaatttgctttagtaaccaaagtagattggtgaagattagtaattcttctgcttaccaacttaaaccaaggtggctttccataggtgaatagaatttttttttcttaatttatgtagaacttttgcagttcaaataagggtttttaggaattgaaacttggtaaacattcagtggtcaagttggttgaatttccattgcattgtaggtcatcagtcaaagagataatgaatttggaaaagttcaaaacaatcttaataaaacagtggtcaatagagttcacacatcattgagcactttactcctttatttttccttttcaaggctttattcttaactagaagtgtttaccctctaggaaagggtcagtaattgttttctgctttgattcttcataataggggacgaacagggaggatccgtgtcctgtcttttaaaactggcatcatttccctgtgtaaagcacatttggaagacaagtacagatgtaagtcgtgtatattaatgctgtattcttttattaatgttggctaattaccctagttctagatgggaaatgacagactgttcttatttgacagcagattcctcatgtaagatgtagaactgcttttagagtgtcataaaatttggtttgtgccattccttgtcaaacattaaattgcaggcatttaagtagagaatgaggattagcttttccagtccaggtattattttacattacattgactgtgtctgaataaaacacatgttcctaggggataaagtctgattttctaacctctttctgtaagtcggaaaaataagtgtgaagatttaatctctgcacttgtctagtctttgggttcttatttaaagaataccatgtgacattcatgttcaagaaacattgtttattttataatcatcttactgcaagttgtactgacacatccaattccgtgacgtgactaacattttattatttgagagacagatagcttgctgtttcttaaaggatagatacgtaccaccctacagaatttccttttgattacgcattgggttcttctgcttaaaaactgtaaaaccaaattaaaagccaatgctagaggagtgatggttcagatgaccaagtgaccatccattcatattgtgaaaggctgcagttggttttccccttgaaatgcttataagcaatcttttcagtaggaatattaaacaaattcagcctagcttgtcttttctctcttcccctgaggcctagccacacatgtgaggagatgtgctaagcttcaggacaggcaggagataaaagccactctgtctcctactgatcatttctccttcaggagtaagccacaaaatacacaaaccattttggccctcacttttatgtagtttccacttgagttttctcatcctcagaacgagagaaaaataactgaacagcttttgttaaccattttaaaatgtatttcggatgagatgggatacctgtgtgcttttctcctttaaatattgtagttacttagtataggttaggttctaatctaccgtatatatggtatagtgacagcacattgtaaatataatattaaattgaataattgaggaagctttgagttggtgtttcgaataactactaagagggaacatgtttttaggttggtgaaacaaaaatattaaatgcaaaatgagatgtttgaaagtaactcataactttgaaaataaacacctaggtatgtatatcggagagcagataaaaagctgtgcgtacaatctcaatttttagtgccatcttaggtatcctgttaaaacatttaatttcctagagtttaaagtgtgcttatgggtacagaaagctttcttggatttactttttttgaggggcaacttctaggtgaatataaggtatgattaaaattttatatctgagaacaaaacataacattgcaagcattcagtatgttcattcattctgttacatatattgggcacctactatccaccgggtactgccattctactgtagatacttctggcacacaactgaccaagatatggttccttccctcaaggggatataagtctcctgccaaaaacgatagacacatattgaatcaatgccagcataacatgatgtgagctattaattagaaatacgcagccaggcgcagtagctcacacctgtaatcccagcacttagggaggccgaggtaggaggatcacttgaggtcaggagttcaagaccagcctggccatcatggtgaaacacgtctccagtaaaaatacaaaaattagctgggtgtgatggcatgtgcctgtaatcgcagctactcaggcggctgaggcaggagaatggcttgaacccgggaggcagaggttgcggtgagcagagatcgcaccactgcactgcagcctgggcgacagagcaagactccgtctcaaaaaacaacaacaacaacaacaaactatgcacagtatcctgtgggaacacatacatgatggactagaagctcagtgatcttatgactccataaagaagtcccaactgtggtacatttttgaatctctggtgtccaaggagggtggtgctttgggccagttatatgtctcttaatgctaaaacacttattttttgatgtagttacatcctatatacaataattcccaaggattatgttctggcttagaagaaatttaagtgtcgagggtacgtgtaagcttgcgcttcttgcagtgacacagtttatgtaaaagttatcacacttcatatatatacagtgatcattaacttgattcataaaaataataaatatccagattagcacaaattagaagtaaccccactctgtggaaatactggctactcttgagaattgctactggaattgagttggatgtcaggttctgctggcatccatgggtgctgtgttttgactgttgcaattttcttcttcctttgtagaccttttcaagcaagtggcaagttcaacaggattttgtgaccagcgcaggctgggcctccttctgcatgattctatccaaattccaagacagttgggtgaagttgcatcctttgggggcagtaacattgagccaagtgtccggagctgcttccaatttgtaagttattcaccttctaggtaacatatttattctttcatattttagaaattaattaaaaaacccacagagcttcgttttctcatattagctcttcagtaggcagtaggtatgggatttgggatatttggaacctctgtaagtaagcagcttctggaactctaggttttgggaaagaagacagtgctgaggaaggaaaagaaatctccatctgcagcagggaccccacagttattgaggtgctagaggggaagaagttcagcaagggaggaaataagtctctagccacagaaatcctatgtatataagaaaatggcctttgtaggcgagtctcttagtctctgagtcctttctctaattctatcattatagcctcctttcaatggctgttggtaaattgttagcacagctgtccttttttttaaaactgtcctttgtagctttgacattcccctattattccaaagtctagaggtgtatactctctgctaatgtccatcactgactgaacacactcttgtccgttctctttcctatcctgtcccattgctttttctctgtcgtagtcagtgccccagaaacaccctcttcttcccaaatgcctgagcactccactggtagacattcatcttgttctaatttttttttctctttccttttttttttttttttcttttttgagttgcagtctcgctctgtcacccaggctggagtgcagtggtgagatctctgctcactgcaacctccacctcccgggttcaagtgattctgctacctcagcctcccgagtagctgggattacaggcgcccaccgccaccccaagctaatttttgtatttttagtagagacagggtttcaccaggttggccaggctggtctcaaactcctgacctcaggtgatccacctgcctcgaactcccaaagtgctcggattacaggcgtaagccaccgtgcctggcctctaatttttattaggtagatagtgctacaatgaacatccttatcgtttagcttttgtctttgaagctttctttataggatcaattctcaggcgtgtgattgccagacaaaataatataaacattttttgtggcctttcttcaaaagttgttctaattgtaacgctatcagtattgaaggagtaagatgctttcggtatcacattattcacagtgttcttatgtttttgtttttggttttttcaagtgctaagagctgtttttcttatgtagggtttctcaatccattctaattctattaacaatggctgagatttacaaaatggaactagctgtagaactaactgggttatatctgaagtctttgaccacagactaggatgaaactatagaaggtttcctgggcagatcactgtgaatatttaggtgtttaaagcagtttgagtatttatttaatagttagttggatagatttaccggatgcacacataataagttcatttatgtaaagtgggatatactgtttgaattattttgccaaaattatggcaaattagttgtaaatgtaaaatgcatgtggagaaataaatatcttttcctcctcatacccaaaccttccaaaatgcagatagatgatcaatccaatcaatcatcaaaatgtagacacaagtaacttccatacaatgaatattaatggccacaggcaatctaggttcattttgattttttaaaatccaattataaaacaacttgccataaacgcgagttatttcctaatcttttggttgtgtgttttttttgttttgttttgttttgagatggagtctccctctgtcgcccaggctggagtgcaatggcgcgatctcggctcactgcaacctccgcctccctggttcaagcaattgtcatgcctcagcctcccgagtagctgggattacagggtgcctgccaccatgcctggctaattttttgtggagacagggtttcaccatgttggccaggctgagctcaaactcctgatctcaagcaatccacctgcctcggcctcccaaagtgctgggattacaggtcctaatcatttttcccctttagtcaagtctcagttactctttgagttctagtgaaacacacacacgtgttcatatatagggatatataaacatatgtgtgtgcattgtgacttgggttaaaggtaaggctcagtgatggtccctgctgcaaagtaaactaggctgtattcagggccagctggattctttgttttctcgcccgagtactgactcatcaggaagccaccaccatcctcactgcagcctctggccctcttggatttggttgtcaggataagcggtggccatacagaagctctgctttccctgggctgccccccttatcaggagaccaacctattccatttctgcctgctacatccttttgctggataacctcctactcccctaagcccatgtctctggtttggttacatttctgtctctgtaataacaactctgtattctcagtctcaaagctttgaattcagtccatccttgcatatttgttgaatgcctcctggttggccagccagtctccaagctctttgaaatgtgaaatgtgttttgttttgttttcagaaggggtctaacttcgtcacccaggctggagtgcagtggcacgatcacagctcattgcagcctcgacctctgggctcaagtgatcctcccacctcagcctcctgagtagctgggactacaggcatggaccgccacgcctggcatttttttggtgtatgtgtgtgtgtgtgcgtgtgtgtgtgtgtgtgtgtgtgtgtgtgtgtgtgtgtgtacagggtctctcgccatgttgcctaggctggtctcgagctcttgggctcaagctgtccacccacctcagcctcccaaaatgttgggagtacaggcgtgagccacggcatccagccttgaaatgttttctatgagactggggggaaatcagtcaagatatgaatggtggtaacaggtggcttttgattttctctgtactatttttattttctgagttttcttctttgaacatttataattagaaaaaaaattagtaaagtgctgcctctttttttagggaaagaaacatgttttgtttgattgctttccattgccattcttacattgtttccaggccttctcatcattgcactggcttcctagcaagcctccacttcacactccagtccttttcattggtcttattgccctcatactagttttagagaaaagcatttcccatatgatgccgtccttgaaaatgtcagtatctttctgttgtctagtgaacaaatcctaattcctctatttaactctcagacctttcctactctggtttcataaccacccatagtttgctttcactatcatgaaacagcttctccttaccatttgtacctattatgcttataaataatattgttaccattgctactaacaaaactttgttcacatgaattctctcatttaatcctcaccaagtctttgaggggaacagaatagtcaggctttggagattttgcttttattattgtttaagtggatgaataatttatttgcgcccttaaagtccctcagctggtggaagggtttgattcctagtccagtatgcccaccgccacatttactacctcattcccaaatatgtagtttctgatacttctgctctccagcttcccaaggccaaacaacagctacttttcctgagtcctggatagaataagaaaaggtataacaagacaggggacccttgagggggaagaggaattagtttgaagtgctggcaaatgtagtatttctaatcagatgctagtaaattccatatgtatggcgaggctttcattacttagatttggggagcctctcagcgttttagcaatttgcaatcaggttgaatggatccattgtaaatacttaggaatacttaggaatccacgtcctggccctggcatgcttttcctcggccaggtgcactggcggtcaccttgcctttcattgtgccacgtgcataaaaatacaatgtttgctgtagggaaagataacaggagtgaaaatgtcctctgccctttgtttgaagtataggaccttcagaatgaggctgggctggttccttcagcaagcttgtgctcaaaggctgctatttctaccagcctgaggtaaacggtaataaagtacttgtttatcctacaagtgcattccttgcattgcagatttgatttcctttgatttcttgtcaccacctggaaaccttactttgtttcaggttggtacagttagaaaggtactgaatcttctgattcagacaagggcccagtagtggcaagaagagaggtacgtgtttgtgtgccacactctctggattatctattaaaggttttctcatatccctccccactaaccacttagaaaaggaaatcacctatcaggtctaaatgtaaaattttgcttatttaaaaatcactataggtcttccaaggaattatccattaagccaggaaatgaagtcacatccatggatatgaaaaaggaatagtcactgtaaatttatggctttgacagtggtatcttcgtagatactaaatgaggcaacaggatatgtttccacattaatagcatattgcagtcaacacatttactgggaaattgactcattttggtagtgatagaagtaaagttttgcaacgagtttaagagatacagctgtaattaatatattgccagcttgttcctttctcatattccatggaaacagccctgttgagagattagattgatttttacgaccttagtaaggccaagcctgccctggcagtgagtcacatagactgcctgaaggaaccttgaggattttctgcacctctcctttttcagatgagaaaacaggcccacagtggcacaatgaatctagtctacatcgtgcaatttacatcatgttatggcttcaaccagttcggagactagattgaaatgacagagtgttaatgtgtcaatgtgatcccctatatgaattttagattgtaatagaatgagatagataaataaacacccctcccccaaaacacatacatgcacacacacccatctttattgaaaatactctaatcccaacatagctgtttagtctatcttcagataaaaccaagtatcacttttaggtgggaaaactatacagtcatgtgctgaagaatgacgttttggtcaatgacaggccatatatactatggtggtcccataagatcaacgtaagaagagattataatggaactgaaaaattcgcattactttgtgacactgtagccattgtaacatcatagcacgaagaattatttcacaaacctgcactgccagtcatttaacaggtaaaaaagtatgttttaaaatatttttaattattatggacacataatagtactcatttatgggttacatgtgatattttgatacaagcatacaatgtgtagggtaacacaatcagagtaattggggtgtccatcatctcaaacattcatcatttctctggtaggaacattcccatttcactcttttagttattttgaaatatacaataaattattgttgccatgcatggtagcacgcacctgtaggaccagcgtttcaggaggctgaggtgggaggatcacttgcgcccaggaattcaaggctgtaatgcacaacaattgcacctgtgaatagtcactacactccaacatggacagcatagtgagaccctatctgtaaaaagatttaaaaatatattgattactatagtggccttattgtgctaccaaacactagatcatatttcttcttactgtatttttgtacccattaaccatcccttttttatcccccgatcttcactacatttcccagactctggtagtcatgattttactctatctccatgagttcaatttttttttttttttttttttttagctcccacacatgagtgagaacatgggatacttgtctttctgtgtgtggctgatctcaacataacgtcttccggttccgtacatgttgctgcaaataatgggatttcattttttatggctgaataatattccattatgtgtttatagtacattttctttatgcattcatccactgatgggcgcttaggttgattctatatcttggctattgtgaacaatgctgcagtcaacatgggagtgcagatatctttttgtggtttcgattttgtagtatcttcttcagtaaacattttaaggactttattgtttagataacgtcaagtataccaactttatattcaatatgcttcacctatgagagctggagtgtcaaaatctgtttattttacatctgttttctgcctcctgttgtacttagtattccaaatgagtaagttgcttttccatctatcttctgaatttctctatttgtatgacaaaaatgaataccatctatgcacagttgttgtaataatgtagaatgatatgaaaatgagaataaattacagtctcaactgttgagaacaagtatttctctgtgttagaaacattcccaattctactcttttagttattttgaaatatacaatgtattattgttgccatgcatggtggcatgcccctgtagtcccagctactcaggagactgaggtgggaggatcagtaacacataaatgagaaagcattccagaatatctggagaagtgactggcagagtggttaagtgcataggctttgaaaccgaactgtgcctgagtccaaatctgagctctgctatttgctggctgtgtgactgtggacacatttcttaaccttcctggcccctgaactcctggaggtgattgtgaggattaaatgaaccaatagaagcaaagcacttaagagctgtagtggatacatagaaggtgcccagtgaatgttagctatgattatctaaagtgtgttgtggcatgaaaatatcctgccaatgttaacagttgcttttatctataacaaaacatcatctgtggattgcattttagagattctggagattctgtttctctgcaaatgttaaaatgccatatcaggagacttttggctggttagacagcattccccgggtcaactgattacttttttttttttttttttttttttttttttttttttttttttttttttgagacagagtctcgctctgttgccaggctggagtccagtggtgccatctcggcacactgcaacctccacctcccaggttcaagtgattctcctgcctcagcctcccaagtagctgggactacaggcacgtgccaccacgcccagctaatttttgtatttttaatagagaaggtttcaccatgttggccaggatggtctcaatctcttgaccttgtgatccgcccacctcagcctcccaaagtgctgggattacaggcatgagccatcacacctggccgattccattttattaatagattttccatcctgaaagtaactcctaaaaaccctccttcacttaggtttcctttggctttttgtgtattaatcagactgtgggccctttggttccatagacattccttttacaccccttttggacggatgaatactcactagtaactaagtaattagtaagagttactacaatttggtatttataaagaggtggcctttcccagaattgaaggtagaccctaatagtccaatcagccttccatagagatagctggctgccatgaaaagctgagagatatcaccgacctcttactgggcctgctcatgaacagttagttaaaattcctgcaattttcagaaaagacccttatcagagtattatcagtattgtcttaagtttaatattggtttccagttgttatttttaaaaattttaagctaccgtgggttaagctttatgatgatctgtttaagtggtttgtttgattaacttctctattggagtaatggatgttttcttcaccagaattttgaagataggtttgtgttgtagttgaaacctgttttgtttatacacttactgctaaggaaaagcacatgtcattttgttttccatcttcatccttctaaagtagcacttcattgttatgaccaaatctttctttcttccttccttcctctcaccctgtcttttccttccttccttcctgccctccctcccgcctctcttcctttcctctcctctcctttcctttctttctttcttttctcttttctttcgttctctctctctccctccctccctctctctgtccccttctccttccctccttccttcctttcttccttccatttctatcacccctaaaattccatcatgctgtatcatctcactaagtcccaatctctggaaaccacagctctgttttctgttcctgtaattttgccttttcctgaactggattttaaaggattgtaggaggcagtagtggaagagctaactttatatcttgttcttttacataatgcgccctgatccacacttgggaaagtatattccatggtacctatagacagatatatgtgctttaccatgtatatgtgaaacttttctaatttaactttcctgttaaattagaactcggtagcataaattaatactgttgagtatacttagggatttgcatagatttaaaattgtgcatatgttccctagggccatggcgttaattggtttattagtcaggtggagtgcagagcctgaggtcaggacagttgtccttgaacatggaaatgaagagtggataatcaccatgtgttattgtttgggctgattttatctttaatgggtgattcagagtcctgattaatatttagagcagtgactgctggcctcctacctgctcattatcttcagaactttaaataaaatacttgatttctacccaagatggtagttatgggaagccttttacttcttcttgtctcacaaagacaactcttgacctctcaatccttaaacaaaaagttctgcttctgcgcatgtggggactcttaaactcattttcatgcctggagattcacatttagggatctaggaaaagcacatctaggcagagtcgatgaggagatgctttaagaaccgtgacaaggacaggaaggaaatcaattttgcgttaggtttgtatttttagagaaaacgaatcctggggaacttttcacactcattactattgacattaataccattgtcctgtccctttcacagttactaaaatcactcttgcccaccctcctgccttgcccacaacctattcccatgaaggggtgacttgggagaaataacggtttccaaccaacgttttattttggaaacatttcaagcacaaagagtagttgaaaggatagtctaaagaacactcatctgtgtcatacatctgttcaatccatggttgcttttcgctctacttacctcctccaccctctcagctctgtttatgtatgtgtctgtctgtgtacatacacacacaaacacattttcccctatgccatttaaaagtaaaggagcatcacaacataaacccctaaacacttcaccatacaccattttcttaaaggatgacattctctaacataactgcaatgctatcgttacacacaaatttaacagcaatccagcaataccctctgatatgcagtccacactgaactttccccagtgccccagaattgttccttatagccactgttttcttccagcatctagtcaaggtttttgtctgtcatgtctctgtaccttcatttagttttgaacagtctcccagcattttgttttcctttcatgacattgacttttttggtagggggacagagtctcgctctgtcacccaggctggagtgcagtggcgcaatctcggctcactgcaacctctgcttcccgagttcatgtgactctccacctcagcctcaggagtagctgggattacaggcatgcaccaccacacccggctgatttttgtatttttagtagagacagggtttcaccacgttggccaggctggtcttgaactcctgacctcaggtgatccacctgcctcggcctcccaaagtactggaattacaggtatcagccaccacgccgggctgacgttgacatttttgaagagttcagaccagttctcttgaagaatgtcccatactctgggcttttctgatggtttccttgtgattagattaatgttaacattttttggccaaaagacgataagatgatgctctgtacctaccactgtatcacaatctggaggaacaaaataacattttgttcctattggtatcactaagaatgttaaggtggtgtctacaagatactttccttgtaaaatatccttttccctttgtaatgagaaagtaattttttgatattttgacatattataatatccattccttaaccttttaccctatggttttagcatttatggatgatccttgtctaattcagttataatattggtggttgcataatggtggctttctaattctaccatactttctgcatgtattagaccattttcttatgtaaagaagagcttctacctctcccccgtctattcatgaatatcactgtggacatccaaggtggttctgagtgtacaaagaatgatatctctctttactgaactgccattggatactatttttgtcttggaattgtttaaaatggcagtgtatggaattgaaagtcctttctccagagagccacataaacagatgtctaataaatacatttccatattaaccaatccttttatgggaacaacacattgacataattaaaacacgtaacatgaaaactgtgctgaattgagaagctcatagagttttgtttcttttttttcctttttgccacttcaatatatatggacccgcacctgtcagtccaggtagctcatacatgccgtagcatctaatggtacgagggacatgtaatgctgaaaagaagggggaaaggagttgatcagatgagatataagtatgcatttatcagtgttgtggggtattcacttgcaccttccattggctctcgcagccatgttatcggcatataattcagttgaagatttatattcacctggaaattgtcctaagtgggccttgcttacttagctatcagactctagtactttcaaacaaattaaagattcaaaagattttggggatcgccttgctttttcccataggaaatcacttttgtcctgtctttttaagactattttaagcatatatttcagtattaaaatcgtagataatcttaagctgtttccttaacctctttgggccttttcttatctgtaacataaagttaaaacaggttatctcaaaagttacttatccctaagtgtctttgattctatgctaaatgttataaaggccgaaagggaaatggattattgtacttatttcaaagcttggccatgatcagcaaagtcttacctgatcttccgggtaacaactcttgtatcagagctataagatatagaaaacagtcttgtacatagagtgtggcatttcacatgagaccaagtgttctctgaatggaaacacacactaagagcaagatgtgaaaaaccattgtgtacaacctcatgtaaatgatcccttgcgtccgtacactatagtttcctcagtaactcaaaggtaaaacccaagtatcttgtgtctaagaggatcaaaatgtcaccttccttctgttttatttgttacatgcaggttttgtatagttttatagagtctttttatcactcatttgattttcataaaaattgggattgtttggaagaagagtcattaatattctttacagcttgttcttgttcctccttttatgttctctgctggtgcagacttctctcttatgtaaaatattccactgatgcccttggtagatttagaggttgttaaagaaattgtaataacagatcagggaacagtcagggactgcctgtcctatactgtctgaccctgactaaccgttctccttgtagttttaaatctttgtgtacagactgtaattcaaaaaacagtttttataaatttaaattcagcaaatctttccaaatgctaaggctttttataacgagggctagaaaagttgagttgtcagctattaatgccaatacctattaacaatggcaatgacattgaaatgattttttggatttatgaagggaacatgttactaatgaaaatagcaaatgaaaatggccactgtattagtccgttttcacgctgctgataaagacatacctgagatggggcaatttacaaaagagagagggtcattggacttaacagttccacgtggctggggaggcctcacaatcatggcagaaggcaaggaggagcaagtcacaacttacctggatggcagcaggcaaaaaaagagcttgtgcagagaaactcccgtttttaaaaccatcagatagtgtgagactcattcactatcacgagaacggcgcaggaaagaccaacccccataagtcaatcacctcccaccaggctcctcccacgacatgtgggaattgtgggagttataattcaagatgagatttgggtggggacacagccaaaccatatcagccacaaaggagagattaccctttttaaaaatctgtggtttgcccacaatgttttccataaatttacctttttctgtcaataaaaatgtttaggaattctatttatggatatgtatgtatttaatatttgcatatttagttcttattttttctctaaatggttatgacctgtactaagtaaaatcaaaacacacacacacacacacacacatacacattgtactagcagacctgctttaccttgcttgggataattatctgccatgattaaataaataaatttctgcaactgtttatcctggaatacactgcatagagttgtcagtttgagaagcaacttgatttcaaatctgagtctacaattttagcgtgtttccttgtgacttctagtttggggcttttaatttcccttttgctctctctaccctcagtttatgaacgagtgtggcatttcggcagttgaataggcctatggtagcctcccagtttctgtgttgtagaggatagttgccggcttattaaatgcccttgcaggactctcagggaagtctgttgtttagtgaatagtgatgaatcaatgtggatttcttagttttgacaagtgaaccatatggttatgtaagatgttaacattggggcagggtttctcaaccttggtgctactgatgctttggcccgaatcattctagttctttgttgtgggaagctgccctgtgtgctgctggatgttttgcagaatcctggcctctatctactaaatgctagtagcaccccctccccgccctccccctcccccccccccccccccccccgcccagttgtgacaaccaaaaatgtctcccgtaaaagataccaggatgaaatcactttttgtcagtcccaaactaactagagccagggcagcatgaaaggaggagggttcatggttacatgcctgagataaagactgtctcaaggactttctaaaatcgccccacaagaaattcctctgttaggactgcagcagtgcacgtaatatgctctcaaaagaacatctgcccagtaatggcatccccactaataaactgacaccagttctggcgttgagcatctgaaacgaactatgtttccaagcagcttatgtaaacttctgtttttaccaataaaagtttccctctacagtctcctcttcagatgcatcttgggttgtaatcctcatttctaattccaaaataaatttaacatatttggcgatgtttttctctgatgttttttggtcgacactccaaacattgttatatttcctctggggtacggcatcatttccggttgagaaccaccgacctagagaaaagctatctgcctgtgcagttcctttcaagggccccaagtgtgaattttgtgtatacctatattttaagccagatcattctgtacataccttctaagtccagatgaagtctgttagccttttatgtgtgataccatcacatagaaaccaacacaaggacatttactgtaatcgataaaggaaattttggacagtttgagaaagtaacttattttgtcttctgctctttataaaatctttacaagtgtatgtttttgctcttcaggatgactaggcagctttttaaaattctgacttcatacagattttataatcttccttttatttcttgcgatcatattgcagttgaattcccacccactgttcaattcagcagattttaacagagactccagaagtatagttcctgtctttaattaatctgcaatttaggaaagaaattaaggaggtatcgttctgtattgtttccaggatggtggtttcttgttatctgagaattactgggcacagtctcttgcccaatgtttacttctctatatagagttgacccttgaaaaacatagatttgaactgtgtgggtccacttataagtggatcgttttcaaccaaatgcgtatcgaaaatgcagtactcaagagatgtgaaacctgcggatatgcgttcagctgggcctactgtgggacttgcgtatgcgtggattttgctgtatctcaacagcaaaatccccgtgggagtggggctgcggcgggccaggaagcaacccctagcatatactgagggatgactgtactaattattgtagtttattaagtgttcacatggttttcacaaacctcacaattgaaatgccaattgccttctcctaaaaaatacaatgtacgtgttcatggtagctgggatgcagggcttgctgagaaatacttaattgcatttcttctgtagccatgaattgattttattaccttgagagaaaaatgagtattcaggtggacctcctggcaggcggttggcccttcagtgtccaaggatttatagaaagcacaacatcaaagaaatccaaaagttcttcggaaccccagcaactctcctacctccaaacttgccatgtaatgcccttttaaacttattatattgataggtaaatcggtttgctagaaattccagatattgagaattctttgtctgtgtaccttgttatatttgtataaaggtgatatttgtatgaagccaccctccagtgtgctgtaacagagcaatagtaatgacaactgattccttcccctagcttttctgttatggatagttgctggcaggtgaggaccaacagaaaaagaggagaaacccaacataattccaaactgtgaccatcataatggaaggagctgtgatagctttgctttctgtgtgtgcatgacatagaaggggaaaatggagttattgccaaaacaacagcaaaagcaaaacaaagccaacaaacaaaacaaaacccagggctaaatgacctttccaagagattttgcttgcatggcttgaaactggtgtttagagatgaggacaaggtcacccttgatactgagaggggattatatctgagacttatatgtatctcaacaaataatggtacttacaaagattatctcagtccagtgaatgccatcatacttatcttttgaccttaataacttcctgctattccaatctatccctatatatttttttctggaatgatcgaaatgtaattttagctgggtttaattctagttctgttaggtctttacagaagcttgcctggcttttaattctttccttcttcattgccagacaaaaggagagggaatataccactaggatacagagtagtttgtcataaaaatgaaagattgaaacagaatgagaacgtgaatccccgtaccttgtcttcagtctgtcagttggcgtaggtgagcagttttaaaagagccaacatgatggatcttgcatcttaggggctagaaatttgagaatgttcaacctttaagcatagaagaatctatagttttttgaaagagtagaacattctacagcctcccttggtaattcacactaatgctttaacaactttcagcatcaggaaattcttccatatgagctacagcctaaattcttcatgctgcttaagtctgtttcttcttgttctgtcctcagtggagagatcgaacagctggtcacaggcccctatgcgagagccattcacataattgaaaactgttattaaatcgccccttcagaagtcactcttgcttgttctctctctctctctctctctctctctctctctctctctctctctctctctctctctctctctctctctctgagaatctgggaagattccagagctgattaacatgttgctttactgatgaccttctcagcttttaatatgttaacgtgctctaagaattttaagaggcagatataatgtgcactgtttctttcattaatttgaccttctcgtgaagcattttgctggacgattgatctgctggacatactgggaaacactgactcagagattttagttgagtaggaaccgtgtgtgagcctacggtacagaacaaaagaaagtaatccagttacactgtctggagaaatagaggtacattctccgcaatcatatttgaagaatagttttctaaatgacaatggcaaactaagccgtgtcatatgaagaagaagtaaaaagaataggaatgaagaggcatggacagataagacagctctggtaaaatatttaaagggctgttcaaagaccaagaacttctgggttgctggtcagatggataataataatgacaataacaatagcaaacatgattcttgctatgtgtcagacacggttccaattgcctttcatttgctgactcacgtaatcataaaataactctatgaggtaggcactattaatatttccagtttgtagcagagaaaaagtaagacacagagagataaagttattttcctaaggtcacacagccagtgagtggtgaactccagtggtttaactctggaacttctatatgctgtgctgatggatttcagctcaatgtgatgcagcacttttgacaggggtatctggacacaggtgttcaggatcaccttctaaggatgtttcccagctctctcacatgggtggtgtagtggctgtaagcacacactggcatgggtaagagtttggactcgatgaatgctgagtttggactcagtgaatcctgaaagtcttacagctctgtggtgccatgccaaaaggatgaatggacttgcatgatctttttcatttttagattgcataattctttataaacttttttttccacaaagtacctctgtgatggaactctacacagagaaaagtgctcagcaacagctttttaaaatttaacttgtaagttcaggggtacctgtctaggtttcttatgaggtaaacttgtgtcatgggggtttgttgtacagattattttgtcacccaagtattaagcctaatacccattagttattttcctgatcttctccctcctcccaccctccatcctctgataagccacagtgtgtgtttttcccctctatctgcccatgtgttctcatcatttaactcccacttataagtgaaaacatgcaatacttggttttctgttcctgcattagtttgctaaggataatggcctccagctccatccatgttcctgcaaagaacatgatctcattcttttttctggctccggagtattccagggtgtatatgtaccacgttttctttattcagtcttccattggtgggcatttagattgattctaggtctttggtaaacagtagcatttgatcggaagtttgaactgataccattttgcagctaggaaatccaaagttaaacagtttattatagtgttgctaaatttagaattaggggtaatgactggagtgctgttgaggtgatcagtgttataagccaaatgacctgtcagtctaaaccctcctgcctttctatctgaaatgtggatatgtcctttattaggaaaccacattacaagagaagcaacttggctttgcagctcaaatacccatgacttgtgtgatactaagtattcccatgtcatatattcaactgaaattggctgtggaataagtaatgcttcttggttcttggcaaaagcaaaggagaatcatctctggagaaagcacttttattctaggctcaagcttttatttatctctagaaaatattggtaaggtcagtttagtacgtggtaaaaaaaaaaaacaaaaaacatattaagcacacaagaaatcaaggtggaaaaagaaagaaatcaaggtgaatgagaaccagaagaaatagcaaaccatagaagcagacctacgataacatcatattccagaattattagacagattattttcttaattgtgtttatgcagttagaaaaataaaaaacaacattgaaaaatatctacagggaaccacaaacctgagaagttaccttaaaaatgaccaagtagtatttctagatgtcaaaagtacaataatcaaaatttaaaactgtatgggtttacagcagaccggcaagagaaatggatacccagacagtaaggcagaaggaattaataagaatgaagcacagaaggatgttttaaaaagatgtggggcagagaggggggaactagggaagtcctgttcagagaaatatagattgaagaagagtaacatttatgtaacagagttctgaaagtagaatggagagggaatggagaagaggcactatttgttgagagaatgacggagaagattccacagctgattaaagactctaaatcacaggtttaagaagtccagtgaatcctaagcagtctaaatcaaatcctagaaacagcacaagatagaaaacagatagattatctttattttttttattttatttttattatactttaagttttagggtacatgtgcacaatgtgcaggttagttacatatgtatacatgtgccatgctggtgtgctgcacccactaactcgtcatctagcattaggtatatctcctaatgctatccctcccccctccccccaccccacaacagtccccagagtgtgatgttccccttcctatgtccatgtgttctcattgttccattcccacctatgagtgagaacatgcggtgtttggttttttgtccttgcgatagtttactgagaatgatgatttccaatttcatccatgtccctacaaaggacatgaactcatccttttttatggctgcatagtattccatggtgtatatgtgccacattttcttaatccagtctatcattgttgggcatttgggttggttccaagtctttgctattgtgaatagtgccgcaataaacatacgtgtgcatgtgtctttatagcagcatgatttatagtcctttgggtatatacccagtaatgggatggctgggtcaaatggtatttctagttctagatccctgaggaatcgccacactgacttccacaatggttgaactagtttacagtcccaccaacagtgtaaaagtgttcctatttctccacatcctctccagcacctgttgtttcctgactttttaatgattgccattctaactggtgtgagatggtatctcattgtggttttgatttgcatttctctgatggccagtgatggtgagcattttttcatgtgttttttgcaaaggagcaacagtcatctttactattgacttctcagcagcaacagagatagacgaaagtggagtaatatttcagtattcaaaaacaaaataaaaacaagaccccaaaacctttcaatcaaaaattttatacttgggccaggcgcagtggctcacgcctgttatcccagcactttgggaggccgaggcgggtggatcattttaagtcaggagttcgagacctgcctagtcaacatggtgaaaccccatctctactaaaaatacaaaaagtagccgggtggggtggcgtgtgcccatggtcccagctacttgggaggctgaggcatgagaatcacttgaacccaggaggcggagattgcaggagccgagatcacgccactgcactccagcctgggcaatagagatagagtcagtctcaaaaaaaaaaaaaattgtatttaatgaagataactatcaggaatatggattttttttttaaaaaaaggaggtattttcagacaaacagagcttgagaaatgcaccaccaacagctaaaggaaattctaagggacatatttcaggcagaactaatcccagatggaagatttgagatgaaagaaagcaatgaagagcaaaaaagtagtcaatatataggtcaatctatctaataatataaaaaattaaaacaatcctatagggttgaaaaaaacaaggtataattaaaattcatgaatatagtaacatataaatcaaatggtggtattttgagattgttgagatcattgtcctgtctgggatgaattgtatttcttacatttagactttgaaagagagagaaatagagaggcagacagaatcaacagggcatcatgaaaacagcgctaagccaggaggtttggattctattatcagctctgctgctagctgtatggcctttgaaaagctccttttctggtctacaaaatcagtttgcttgtctgttagatgaggctttggaaccagatgaattttaaagcccctcattatgattctatgagaaacagattctctagaaaaaaaaatcagttgtccccctcctttgaaattttatcagtaaacacctgcatttcacttctggctaacttttatgtatcagttcaaaaattaaagctaaataaagtctcgctcaggtgtgtagtttgcttacctttctcgtttgttggttttgttttcttttcttgtcatctagtagccaaaaagagtaatggcagtttaccaaagccttaggagtgggtagctctttggatatcagggagcatttgcagaaacaagctgtgaaaagccagcctagctttgcaaccattgttctttctatcttttctgtttaacttattaatcgaactgatatacacctcctttgccatcttgccttctttcctttcatccttttgccctccttctctctccctcctgtctttgcaggctaataataagccagagatcgaagcggccctcttcctagactggatgagactggaaccccagtccatggtgtggctgcccgtcctgcacagagtggctgctgcagaaactgccaagcatcaggccaaatgtaacatctgcaaagagtgtccaatcattggattcaggtattaggaaccaaaaaaaaaatgtcatttttttctcatcatttttcacctttttatgacttgatcttttatctcctgtgccagttgctgttagttcgtaccgtctccaaagtgggagagaaggtgattgggctggaacatcgatcattcctgtcaccctcctgatcgctaggttattttggtggatctcacttattaggctggtgtcccttaccaccttcactcttcagctcttcggagccacatttttggttgagcaggccaaagtgcgtgtcttcacggaggtattacagatgaactgtacctcctccttcctggaaccaaaacatttttaccatctttcctttttcacggtctttcctgtttatagaaacttcccaagaatcagttataaaactgagagatgattctattctgggaggaaccataatagtagctcagtctctcattcactttgcaccatttttttttctcccttaagtaacaagaattgttttcagcatcttagaacttgcttctttatctgtgaatctgattacattctttgtatagtatcccagtgaacttctaaaggaataaaaagtaggcaagtaaatggaagattcacaaagcagctaaaaaacaaccagtccttatacatttagaagtgaaagagataggaaacgtagcaggttattctgatagtcttaaaatatcatggaaaacaaggccaaataaatctttagccctgctgacctgtttggggagacaggatttttttttaaatgaattaatctcacttaacattaatcctaaatcctaattctgaaactgcgatgtccttaaatgtgtgaatcaacatcaaggtttctatagtgatgaataagccacaaagttgtaaactagctctatggtctatgcctgtgcagaatccacttagcagcaaagtaaacactcttttccagttacgtgtgaactggttttgttactttattttctaataactaccttgtactgttgcgtgctttttattcatagtgcttttttacttttggtgtttattgttccatagtcatgctgtttacaaagaggttttacaaaaacttttagaggtttctgaagcctagatagacaacagtgagtaggtactgcttgcaaaggtcaccttctttccttcccggtttcttggcaggtaaaaatgataccatgggggtggggagtggggaagggaagccacagtgactgcattagatttctaagctaccttttctctgcttccttagctagtgggctttgtatacaagggaaatttttataaaataaagaagaagaatgccttggaggatctgaaagagcactttcaccttcaattcttttgcccttatcatattatattattttaggacccagcacttctcattcctcctgtccccctcttgaaagatggctggaatctaaaaaagatagctttccttcccacttccccatatgtgacataagaaatatgtttatttgaattggctaaggttcttatctgagaaagcaaaaggcaggagagtatgaaacaaagaatatcgcattctgataatggaggaaatgtaccaactagtatttacagattataaattcttccatctaatccaaatttcatgttctcttggggcttcagttatcatttgtaggtaatggggtgagagatttctgaagagatagagataaaagagttcattcgagtaactgtttgaagatgaatcgtatcagtcaattagaaaacattattaaagcgagacttgttttaattgaaagttcttgttcacatttcttttgtcttgtgaaattgctttatcttgacaatgttttgaaaataattgcttcagaaaacttttgtcccatgatgggtaaggggcatgcacagcgtaagtctgtcgctcctggaagttcttttaaatttgagtatttggttttcaaaagactggaaattttccagtaccttcctacttaatctcaaagagttcctagtggagtttaaataaaagctgagtttttcttccctccttccatatgtttataggataatctttctgccaaaatgttttggtactgtaggagaggcaccggaaaaatctggaggcagaaagttaatcacttaccttgtgggactaatgaacattgctttctgtttctcaaattagaacgtggtagaaggtttattaaagagtgttctttgggaatttgattcgaagaaatacatacgtgtttgtttttgctctttatcaggtacaggagtctaaagcactttaattatgacatctgccaaagctgctttttttctggtcgagttgcaaaaggccataaaatgcactatcccatggtggaatattgcactccggtaagtttgacgccagcctgacgtgagagttagttcacctgggataaatttcagttttgtacaatactgcagatcatgtataatgctgtgatttgtcacttccccagatgttccccagctaaagtggctctcaactgtaggcttcaggatttaccctatccctggtgcctaggggagtgcctggcacatatggaacatgatagaccctcaataaatattgttggatgaataaatagggttttcattctgtgtgcatggttgtattgaagacgttttcacgtttattttgcacagccttagaggttgtgtggggcgatcttatggccatgaggcatgttgagtatgggggatggttctaggttcccccaaattcataaactaccacttttaatcaatgttgctcacctattatctgtcctgtatactagtgacattttaaaaatccattttatatgctaacacttactaaatgctaggcatttaccttttaaactaccctgtgtaaaataagtactatgatttttatcccctctatacagatgaggaccctgaggtcctgaggttaaataatttactcaaggttctataagtaagagttgaagccatctcctaagatgttattttaggaaaatgttaagtggccaatagaactgtgaaaaatcactagggaaatggcaaggatgtagacttggtggccagacagacctgagtacaaatctgcctaagaattaaagacaggctcctctcaggtttgttttttctaaaataaacctgtccctgttgactgtagagccacccttcgtgtttctcttctctttctttaattcttacagtctcctcttctctaaactttgcatgcttgctattcaagatacggtctgttgactaatcatcatatgtctattggcattaccttggtctttattagaaatgtgaaaccacaggccccaactcctgatgctctaaatcaaaacccacattttagcgagatctgcagctggttcccatacacaacaaagtatgagaagctctgctttagagcatctctctcttccatcatcagagtgatcctcccagatatttgcctgtctcacttttattcctcttatagagatggtcagtgattgagaatgtaccatgctatgaatagaccgaaatttagtgggtgaagcatgctatcattttgtactaagtagtttttaaaataccataaagtgtggtaaaatttaatgtcacctttttgaccttaagacctataaactaccatttattgagtagcctagtaagcttgtatgtttcttttatttatcataacaacgtgttgaggtgttgttgctcccattttactgatgatcagagcctctgagaagtaaataactcagccaaattagtacatgccaggcctggtttcagagccccatttgtctgattccaaagcctttgctcacaaccacaacactctccttaattacaaaacaagtgtcatggggcagaagactggagtggtcattagttttgaaatcatcctgtcctaaatctgatctcaccatgatctcccttttagactacatcaggagaagatgttcgagactttgccaaggtactaaaaaacaaatttcgaaccaaaaggtattttgcgaagcatccccgaatgggctacctgccagtgcagactgtcttagagggggacaacatggaaacgtgagtagtagcaaaagcagaacacactcttgtttgatgtatatttgaactcctctcagctgaacaccctccttcactcccaaatgcaaacagtctcttctatttctttctttttatttacattagctgaaaagagaaaaataagctgatgtccagttgccactttcccacgtcacttgacaatttctttttccaaaagttaaactttatctcacagggggaaaaaaaaaaaaaaaccacaacacaatacagccactaattgccttacaagccttataagaaatatgggactgtttacaaatgagtgattccagtatttcattttgattttcctctctcacaaatcagtaaatgtgtgtctttttgtatctcattgtgtggtcatatctagtcacttgtttctactcaaaagaaaatatagtcacaggaaactacttcacagtaagtagtaatgattctcaagatcaaaggggacgtcttcacctcttttcaacctgctcctcttttttgccttaactctgatggcagtcacacaactgtgtgtttttcttttaattcactttacaccttggtttggctattgctttccatggttcatacttaattggctggattttatttattttgacctttcagtaaatttttttgcggctgagtttgcgtgtgtctccttcaccacctcattttttgttttgcagtcccgttactctgatcaacttctggccagtagattctgcgtgagtactttttttgctgaagggtgctgctaccaccaacacattcgctcgcttggttctcttttgttctgtttatttgtttgttttcttttgttttgttttgttttatggacatattaattccccttccttcatttcagtttttttttttcttttcttgatgagactttgaaagtaccatctacacagatcaggagaatcagagtgggttttttggttcctccaccaggtgaaattcaaaccagcagaaatcctggcttgaattcaaattataatcaaagaagttattggagttttagctgtattcctgggagacatgtttatatatttcttcatataaaagcaaggaagaagcttctgattacataataacattctttagccatatttcttgagattcgatgctttttagaatctttagggtctgttataagtggactattaaaaatcagcagaattcgttttaaagtatgatgctgagtttggttgaataattttaatgaggtgtgcggactgtttatcaggttatgccatgctatttgactaatcattatatacaagggtttctaaattttgaactaaactcactttgctctcctctccaagctaaatattcagctcataaacaattatacatttgctctaggaggaaagtatttctttgttattactattggtgtgtattaataatactgagcttagataccagcagatgatttatctcagagtttataatgctagaaaactcttttttggggcctgtgatttctatattagcaaacaaagtgcctattttaaaactacattatgtagggttgttataacaaacttttggtatttcaaagtatgctttattaaaatatttattgaaaatcagacagctctgttatggataaaggggaaatgaccaattcggaagataagcttgtgtaagaattcaatttctttttattaaatcttttttattgttccaccatataatttaatctaaactagatccttttttaaaaaccctgtcgtgataaatgcatattattaattgaggtttattttcagtctttaataggcctaaaggaagtggaaggctatgctttcctttttaaaacttcgttattgcgccccttaattttgagatatggtagctataagtagtatattatctgatttatttaatcatcatgcttaaagaacttagggagttatttaggttcagttatgtcctctgcctcttggaaattgtgtttcctaacccaggtagtctgttatagaagttacaaccgttcataaataagaaacttttaaagagttgatacactacagtttcagcttgattggatcctgataagggaatggatttactctatgtggaaataagtttaaccgagtaagaaatccaaacgacaaatatgctaaagaacagttgttacaaatacatagataaaagtagcaccaaataataaacaaagagtaattaatagtccttgaaaggcaaaaaggagctacacgtaagctaatgagaaaaacattatgacaatcagattaacttattttaagtagaagattttgtctgtcttaaacgttgaaagactttaaaattaataacatcttttatttaaaaatattttctaacaactaaaacacacctcccaatttgcctttttatgaagagttggttagattattcagaaatagtgggaagttttaattttgaggaagaaaacaaatctagcagactgaagtctgtgttttctttaatagcagtaattgtatttaaagtatttattcataggattataaatactgtataaaatatattacaaagccatcctattcaggcataagagccaggtcctaacgtgtttcattttgcaagacttgtatctaatgttaacaaatcctatgatgattacaatatttgatccatttgatatggatcacagaatttgaaagtttccagagatacagaccgtttggttttccttagactaaactcttatttgcttgtgtttgtcatattactttaaaactaaagctaacataggcctttacgttgtctgtccataagtgagccagtcaaacgatattctttgagcgattctgcattgaaacctaaatgaatgtcagcttttaattaatagagttttcataaaagagaaggtggtggtgggtgggatggaattgaccaagtaggtcattaactcttatagtaagtaatccttctgggtatatggttttgtgtttaggaagtgggaagcggggaacagtattattaccttcttttggaagtgttttagaaggctttgcacttagttttgtttgtggactaagtggctttgtattttcactaattcttggtttttaaatgattcatctctgaccagtactcccttttggctcattttctggtttaataaatgtctcttttagtgtatattttttaagatttctggttattgtaagttcttgtgcttatgcatgctgtgataggcgccactgatattaataagaaaaataacatggaattatccttgaggcaaagaattaaagctctgtataagattttctgtataaaatggtattaaagtattttggatttatatgcctacttttcttggtgtacttatgctccaaggtcttaggctttcattcttgtacacacttccaggatagcaactattacaagggaaaacactactaatgtattttccctgatggtaggctttttgcttattaaaaaaatatgtaattgaaagactggtctgttccaaaagatagttcttataatacaaataatccaagtattaatttatcttgatctgcagtgaagatttcaaaacagaccttagcatttttctaataatgggctatgccagggttctagaagattaacagattaactctccaaaactatagtgaagtttcacatggaaatctttggatctgcttattaaattgagtagtcatcgttttgtttcctcttgacaatttaaacgtctttataactcatttcaatttgattatgattacacttgacctagatgacattggtttcataaataagacctttctctctcagggaagaattccatttccctagttatttgctatagtgtgtcgtaattatcttactgtagtatattaagaaatatgaatttctggcacattttctaatgcaagcttagctactggtaactgcatctttttcttttttaatgtaagaagaaacaaacacattctccttagtgtttcaaccaagtccttcaacgctacttggacactgggctaaaccagggtcctctctgaattacattatcgttgacttttggatttatgcctttacctaagggctttctgtgtcagcagagaaatggaagagaccttttgtgctattccaattaaaagaaaaagtccaagcctaaactggttttcagaacagatggttttttttcctaaggttaatccaaaagatactataaaaacttcaaggataattaatagatcagatatgaaaggatgaaaaaatgttaaccctaccagaattctagcctatggagataagaaaagataggtgtttatatacaaaaagcatatagactattcctgctaatgatctcctcttattttctcacctatgttttagcacacagtatctctaagaaatatttcagatatcatgacgttctatgaaatttagtcattcttttttaaaacctcacaatataatccagggtcattctattttgtgctagaaattagtggtatagtcttgctgctgaattggaagatacatttcttctttacaaaattgcatagatcaagacatcttgatacatggagttttaagaagtcttgtactagagtagcctctttgaagctaaaataattgtaagtatctaggcagatatacagctttgatccaataagaagatagcctataaatggcgcaggtgtaaactatttaaaattttaaaccacatagggctaacacaatttcggaattataggatgtgagaaattacaaagtaggaggacaaaatgcttcctagaaactgtctcccccaaccttttctacgatgggaattttccagagaagattttggcctctcttcatggcttttaataaaagcagaagtatgagaaatcatctctcaatcctggattttaaaatacttgataatatttaagatataggagcaactaaatgtatacattatccatagaattagaataaaagcattctaggccatgtgtataacataactgtgtggtgggttttttctccattaatggatggtatctgtgactaatcacattttctgccttataggcctgcctcgtcccctcagctttcacacgatgatactcattcacgcattgaacattatgctagcaggtatgagactagttgtatgccaggcaaatattgattgaaataactaaccaaggaaagctaacctatgatattttaaacaaatcttttctttttttccccaaacttgtctgattcctactaatcaacttgccctctaacgtgcatgccgttccactgcatgttgtttttggtcaccaacaagagcattagtccagaataatcttccctaaccctggcttttaaacatttccggtagccttgctatgtttttttatactgagcacatttactaaattggcttacaaatagtttaacctccttagaaaactgctagaccagacattcatatatgaaaaaatgatactatattatatggagaatatgaaagcatcagctttccgtttgtgtatttattttacatgatatgctgtaaagaagagaataattaattttcctaatccttggacttttctgtctcaccttctttgtgtttgagatgatttttatacctaaaaactgaattactaattttaaaatattttatgcttgttaaatccgtaagagtttggttaacttttttagttgtaaaaaaacaaacaaacaaacaaacaaaaaaccccctgtataattgcctgaggtgaagaagattttaaaggtaaaaattggtggcagaatgtttagagagcttactgtgcatccatcctttgtcaatattctaactgctggacatgtttaccaatcgtgaaaagcattagctagctgtgtaagtctgtcatcagtggaaagtagtaattgtcctaaaagacaaggggtagtgtaaggtagggagtgcacttattgttagggaagcttttcttctgaaaacaaagacctgttctcagtgaaagcaagactgatctgtagggggaaaacagtgaaatataactttccttagaatttctatcataaatgtagtgctactaactagctgtggtctaccacacactgcctcaaatggttaagccaacacacacatcctttaatttgaaggattcctttctcttcttgccatgatttatcctttagttttcaggaatgttcgattaggtcttgaatagattctaagacgtcacataagttttaatgagcttttacgttttttatcaggctagcagaaatggaaaacagcaatggatcttatctaaatgatagcatctctcctaatgagagcatgtaagtatcccatctctttttacaaaatgttcctgacaatgaaattgctttgagggatttagaggtaggatagcacaggatataggaattagcatcatattcatttgatcttttaaggagccattcatttacttttttcctttaattcttaatgccctggcatggaatgagctcatccaaattctggcattattagtattcagagtagcaaaaatagtttgccttactcttatttgaacttatttcataccatatgattacaaattgcagagtcccaagtatttatagtaatgcttaatctttgaccaaacctgccagatatttaaagggataggatattaattttaaagtcatggctaagtactattttctccactcatggggagtggaaacgtgatcttggtatagcatggctattcacatatggtaggttagttgggcattttccttcagaaatccaaagaagtagatttttgtgatttagcatcttcacaagataaataaagtgaggcaatcttatgaagagtttccagaggagaagtaccaattcaggttgcaggttgttagcaggatgataagccaaccctgttaaactttaaggacggagatagagcggtgctaagagcagcagggaacacagctatggcagggaaacaggcttcattatagagtgagggcagtgttcacaatacagagcacaaaggaacattgccatgaaccaagtaaatgctgaccggggcttgaggtagagagagcagacattgaagcaaatatgaaggaaaaaataaggatttgccaagtgaataaataacataaagagaagaaatctagtcaaagtattacgatgcctttttagtttgataaagtaaggatatctcacccatcttggagaatatagacaaagggaagaatggtaaatttatcatatgtagttggtgtggcaacacaaagtcatgctcagatgagaaaagaaccttcataaggattaggccaaaagaaatagtatcaaagtggcatatatataactagttattgaagacatgagaataaataatctcatctggtacataaacgatcaagctaataataaagaatcaagtcaaccctcagtcatttgtatatgacttacttccttcaaacaaacaaacaaaaaagcctttccccaaccataactgtgatgccttatctttcttagctatgggaaaaagtattaatggtactaatatataagatacttcaacagtaaaatgtgtggccaaagaatcagccaaatgtaaatagcttgtgcttctttggctcactgattttggtattagaagctctagcacattcagattaattcgagttgtatctacgtaacagtggctgtcattcattgactgcctaagagaacaggaagaaaagtgtagttacaactctaggttataattaaacatgggaagttctagcagtacaacttcagaatttggaatgagtgtgataaattaggtggtaaaactgcttttgttttattttaaaataagctttagcttattctgaggacataaaatccattttgactcaatgttggatggcaaaaactcatggcattttaggggcaggtttggggaagtggtttggtggattggttgacttcacttaaatgtgtgtttttaatacccaataattatttttagtcagcttttcacatctaaaccaggtaactggcttgataaacaaaaataattcaaatgagaaggactttttcctaaatttctgatatttttcaacttaagtgggtatggagaggagaatattagcgtatcatcttaatgatatctaaccagaaacaatgagctttagcctgtcattacggacagaagaaaattcttataacttggaggtaaacaggcctttccggagcttggagcaatgcattcagaaaaaagtttgtcctgtgtattagagagttcctagtttccaggaaagattgtagctgcctccccaaatagaagcctttttgcctccttttcccgcaagattagtccttaaaaccattatgtataaatttaaaaataaataaaacttgtatttaaaaaaactctgccccgaggaatgagatgttcagtcttcttttaatcagtcaccttaatgtcttttttccccttaattttcgttcttctgtctaaacaataactgaatgaaacaatcatgtatctccagtttaattgttgttgtcattctgcctcaatgacttatataagttaaaactgacttactgaagcaatactttttggttacattgccttccacttaataaaatatttcctctgttacttttagagctgcaaggtattttttcctactcagtacaacaatagcgtgggttagtgaacagattatcttgacaggcttggtggccaaagcattatacagccattattatatcttttaatattttttagctattgactaacatcaacgtagagtcccagtatttctgtaattctgcctttcatttatccgtgtaaataggccaatcaatttcatttgaaaatctgagcaagaaaacactttgaattggtaccagtagaatggtagatcacaacctcagcagtatcaaaaggtctttagaagcaggaaaaaaggtctaattaattgttaagagcaaataaatgtttctattttcaaatacactcctgagtccctaacccccaaagcaaaataagggggggaaaaaaccaaaacctttgattttattttccagagatgatgaacatttgttaatccagcattactgccaaagtttgaaccaggactcccccctgagccagcctcgtagtcctgcccagatcttgatttccttagagagtgaggaaagaggggagctagagagaatcctagcagatcttgaggaagaaaacaggtgagttttctttctagctttgtcattggtatgcagagtgcatacacttgcacacatagaaaagtgccaggaatcttcacttagagtcattttatgtctaattgttttctaaaataatctgtttagctccatttgcagattctctctctcttttttttttttgttatctgaaagaagacaatggatgcaatagtatgatgaagaactcatattttaggtgtgaaggagttaatgctgatggtggtatttgacttgttgcatgtgtctccaaggctttgattttatatttcagaatagaatttaagaaaaaagtaggttatttaattttatgattatatgattttttttacatgtgtttggccatattatctacctcaaacatttaagaaagtagggttattggcttggtcatattgggaaaccaattgtttcatcttatttttcatcatcaaatgcagaaattattatttatgctcaccatcatagcaggttagtgagacaattccaattgtcagccatcacctgtaaaagacagtcatgtaaaaatagcagaaattgtagaagagaaaaaggctaaagaactctcataatgactgcagggaggacaaagatgtaaacatctggggtactgtattgtgtcaggataatgcaaatcattggactttcagttctgtattacatttattatgtcacaggtcccttggtttaaaaagtcttctcacatgatcacttctaactcacaatgtgccttcttcagacagatgccaccaagcaaggatttaaagtagatgttgctcagatttgtgggtcttaagtactttcatctctttggttgagcccaaggcaccaaaagctcttaacgtaggcaacgcagtgtgtctgagatcagtgccctcgggagtatgccacttcaggatgaaaaaacaaactgccactcttccattgcttcctgctgccactgcgagccttctagctcttaacaccttttacctatggccatagctccttatctggttggcttccctttagtctctttcccacccttgcaataaatcctccatactgactctacttgtacatcttgccagaaccaagacccatcatggcattcccctttcactggatttctgcatgtagaaaaaaatcaagcttcttagtggggcgttcaaacccttccacaatattctcttgacttgctttttctatgccatcttcttttgttctccctgtgttctggctatgctgttgtagctagtatttctgaatacatcctgctctcatctacctttggggtcaagctcaagcttgagtctcagcctaactgctaacctctaacccaccactgccgtatctgacaaaggaatcccacctatcctccatcacactgctcaaaataactttccccatggagccctgctagatccctgcagttggaagaaatctgtcttttgcctctattcccagagcactttggacctttctcagaaaattccttgacagttttcctttttatcagttattaccagtgcctctctttaatgagctagtgtgtgtctttggggcatggactgtatcttaatcatcttcatatcctccagagtacttagcatggtttgaatatttaatggctactcaggaaatgtttgctaaaaacctgaaaatacagcaagaacatcacatgagtaccatccacgagataatattgaactttttttgttgttttaatgatagctttatttttggccgtacttttgagatcatttgtcagtgaagaccatggtagagaaaacatttctactttattgagaataatcagtaatatccatttatgttaaatctgtaattattgtaggggtcaaagtcaaatcggaataaaaagttggaactgacactgtaaatagaatttgatgttaccaaggagtaaatatatttttgaagtatatgatcgtgtaatatatcttttgagctcattggtcaagagccctgcctcgtttgtggttagcatagtctttctccgtaccattgcacccgggtcaaagaatgtttgtaaagagtactgataactatcatttatttatcattttatcattttgagtgcacttttacatattttagatcatttaatcttcttacaaacgctatggagaagagactgtcgcctttctgtgaatgagacacaggttcttagaggttcacacagcttgccccagatttcccagtcagccagtggtagaactgaattgaaatccagatttttctgactctaaataggcaactctgccttcaaccagataataaagaagagtaagtctctgtgaatgtcatttacatagaattgcggcatattccccagaatgtgccttaacttgagggactatctatgaggactgagtgtcccggaataaacctgttcatctacttgtggcacagcgataaccgctttaccctggaagatatccaagaccattctccaagaatgggatggtttgttctctaaaagaacaaaaaacataacaccaggcctacttagagctccaaaatgaggactctggggttgatgcaaatctttgtgtaagttaccttgaccttcacgaaatgatcaggatgagcttccttcattgtcccttcattttgtcctatttgaccttctaccaaattccaaagaaatgtctccacagagttcccttcctgaaaacagcccgtgtgttttctttgatctgccctgtcctgtcttcttgcagttctgcgcaaggagcttcagagccctagatttgccttcgctacccttgaattcagtgttgcttaaggagcctttaatttgccatttcctgttgagaaaacccaggaattctttagatgccctctctgtgcatgtctagctggctatgtcctaagtcagcattgggctacgcaatctgacaaatacgagcatacttttagagaaaataagaaagtatatttaaaattgagattgccccaagtcctttggatgtgtacttattgatctgttaatatatatattttatgttcctttagctgtgatttatctccaaataacagcaaaagagagaggcctggagagccccattcctgactagatatttattaaattccattaattgttcttattcatgacacctccctacaaccccctagaaaaacagaggatggctgtttgagaagtgtctcagaggtatcttatctctgcctttagaattccatttctcctggttgttgcacatagtattcaataaatatttgttgaatgcattaatgaataaatgaattgaagctgaatttattttaattgtagcatacatgcatgcacttttgactaaagttcttttacaaacctaatttcgtagagaaaagcctttcaaagactttgttttctgcttgcttttcaaaattctcccctttttcaaactgccttgattagcaccaggcatggctttgtcataaatttagaatgttaagaacccgttttccaaatcacaggcactgtatgtatcccacattggtgttctctgattcttggttgatgccacagagataaggctaaagctctgagtaaaagctaaatctgactgagtttttcccatagtgcctcccataagtttggatgactaatggtgttagtgagatatctaatctttaatatttcgcttctgcatcatatttctccctcattaccacatataattcagatacatctttatttggcaaagagccactggatcttgggtttttgccccattgtgtgtccttagcattgcagactcaaggtttacttttttttcttgcgttgattaaagccttcagtctcctgacttaagcctgtagtgttcaaatacagagatgtatttgtctctgcactgtctaaataaaccaagacttgctctgaaattcaaggtatgatcctagcaatgaaaaggtagcctttctgagagacaaagacattgtcgttctactacctgcagagcaaattgattagattgttctcaagtcaacaaggtggctaaatattaacctaattcaccataaagtctaaagttaaagttgttagtagatgttatataacacgagggaactctgtagattcttaatacctactcaggacctttcatatgtcttgttgggcagtaagaccttatgaagccaaaatttgagttttctctttttcctttaaattcctccagtgattgtgcaagattattattgttacagtcaaagaagttctagatcagttactgataccactgaattaaagtagctggaaatcatgatcccgttgctttactttgtaattgacttgatgactttggacctagtctagtagctatcaatcttcatagctacgggaaatctttattcaatgttctttcattaggtctttgtgcaagtctccaatgatggtgaaaagatggccaaaatgaagggaatctgaagaggttaggaatgggcattcctatggaatataaacaaaggtgtcagggtgaggaatggcagagtttgtttgagggaaactgcagttgtattaccttttttaagaaggcaaagaatgagaggagatgaggctgaccaggtcagcaagggcaggtcgggaagggtgtggtacccactgcagagttgctgcctccgtgcctagtctagggagcaactcaagggtgtgatccaggagtcaggccatgatattgacatgaatatacgccacacaggcagctgtgcggagggtaactttgaaaagagcgatgctggaacgaggaaatcaagctggggggagtcacatgggagcccaggaaagagatgattagagccttaagtaaggtgatagaaatgaagtagacaggctgatctgagtgatatttcgggggaggatagagctgtttgattcggtagttctgtgggactagggtatgaaggaatgattcccagggctggtaactacaaaacaagatgatagtagttatttgcagctgggactgataattcaggaggagttgcagcaggtccatcctttaatgcagcagtgtttattagaggtccttcctgaagggctgagtagctggaaggtgataaatgaggtatggaagaggtcgagttgaggtcctggtgacatctccatgtgtaaatgtctgacagtctgagagatagaactctgatgcttgtagaaaggatataagcctgagatattaggactgtgagtcgccagctcacaggtggtagttgaaaccgtgagaatgaatttatatatcccgggagcatgtagcagaaggagaacactggatttggtagaactccggaagatgtgaacattaaagtgtgtatttaattacttttatttttagtagagaatacatgtatattattatacaaaatccaaagggttcaaaaagacatatagagaaaagtgaatccttctccaaccttctcccctggctgtggtgtttccagctctggaggctgccatctttcttggtttcttgtgtttccttccaaacatgctctctacatatgcaaatatttgcaaacatatttatggttgttggggttacttcacacagtgtcgtgcagtgttcactctggttttctctttttacttaaaaatctctaattttcacatgctggagaaatgtgccagaagaagaggagggcagagcttgggaatgatgggagcattttcccacaggaggcaggagagagaagggttagggaactaaagtatgggaggaggcgtgaccttgaatgagaggaaggactgcctctgaagacaaagtggtaggtaaggaatttagggtaaggaagggaggaaagaagcataatggaatgaatgttaaaatgtccagtagacatcactggaaataattcaagactgattcctacggctgttcccacatgtttttaaagttggagtggagaggaaagcgtggtatatgatacatttaacgaaactaggcattcaagttacttggtgtattagtccattttcatacggggcaatttacaaagaaaaagaggtttaatggactcacagttccgtgtggctgggaaggcctcacaatcatggcagaaggtgaaggaggaggaaaggcatgtcttacacggtggcaggcaagagagcatgtgcaggagaactgccctttttaaaaccatcagatctcatgagagttactatcacaaaaacagcatgggaaaaccccacccccatgattcagttacctcccactgggttcctcccatgatatgtgcggattatgagagctataattcaagatcagatttgggtggagatccagccaaactatatcatttggtgacatgggccccaaaacaaagggctacagagcccttcttgagacaaagggagctagtttgatcacagaaatcagaaagccaagaccttttatggcaaggatgaataagagctgaagggcatacatgccacatttaagaagctgtgtaagaatggggtcaaccatctcagctctactcaggcagggaggacaggaacatggtagaagtggaatcaccattattcacagactcagtttctaactagcagggccagtgtaactaaatttccttcagtttatccaaagttaattgaagtctgaggggactgattcatagtatgcagttcatggcagtgaatggataacccagaatgaaagtttatttctccctttatcctaattatctctctttttaactgccttgtattaaaatgttatcaaggttgccttaaagcttttttaggaggagacagcatctggtttaagtgcaaatactagatctattaaaatgaggaatatattcattttttcggcacacagcatcctgtgtcttagaatccagtgtcttaggaatcacaataaaaatcaaattgtgttctggtgagcctagaatcttggcatctaaaattggatgtttgtgaggactgcttcatactacaaaaaaattgaagcacccctctggcgattagaatattcacatcttacaagtacagctgccatctccctagaacatgctggataagagtttatgttcttacaatccaatttcccttttttttttttttttttttttagatttttcatgaagaccctcatcctcctgttggccttcatttgccaattgtccctctacagtagaattgattatggtcatgagtttctttagctactttccaggcctgaggatgtaattctgttcaattctgcagatagttactgagtgcttaatgtaattttaaaattatgagactacaaagatgaataagccttggttcttaccctcatggagctcaaaatttattttaaaaaagttaaaatagaaacaactacttatatcctactgttacaagtgctctgggggcacagaggtgaatgatttattctatcagagggagtagagaggcctttacaaagagagtttaagagttgaagactgaatgggagttttccagtctgagagatgggggaaggatgagttttccagactggtggaccagtgagtaatgtgtggcttggaatgaggagaataagagggcagtgggatggtaggtggggactactgtttaaaggactttgtgcatcatactaaggagtttgggttttatcctataagcaggtgaacagtgatggctttttgacgggggggaggattgagaaaaataactgacctggcagaaagctaaagccatgaagattggtagaagcacagtggaatagtccattaaaagatgccaggttcttaactaaggatgtcttaggcaagtgaagaaggggatggagaaattagaaggtcactgaatgaatgagaccaagggaaaatggagagggggaggcatctggtgttacggaaagttttaatttgggaactgggaaatgatcattgaaaaacaaacaaaagcaacctagtgcacccaggaaaaactcctgatttgcaaagggttagtgcatggagagaaagagctacgtatcagacatactgaattctatttgcccaaggacatttcaagtggaaatttcctatgttgattttacgtattcagttttcagaaaggattctttaaaaagtcatagcaatacaattcctgcaatataaataatagatcaatgaacatcatagggattagcatagttgatttgactaagcttcagattcagtttgagcttccctgtagccagggagataataggaaacaaagatttgtctgtctcttaatattgaattaaagaagcacgcagcatcctaaagaaacatcattgttttcctggctctacgtaataataataataacaaaaatagctgtcctttgagtgattgctatggacaggaactgttctgagtacatatgaactcctatttaatccttaaaacaaccctatgaaagagaggctgtttccagaggattacgtggcacagagtattaaggacacttcatatggccagcaagtaataggacctgtattcaaacttgggtggtggtcctgaactcttaagcagcgttacacttgaagtgattattggctagtgtccttatcaacatttttataacaaatcccaagggaaattatatgtggctgtttctcatggcctttgataattgtggaaagcttaacattaaaacaccaaagatagggtgacagttctccaaggataaaggtcactgttgcctaaaatgtattctgcagaataccactgagatactctgagaaaaaaaggattccaaggacagtaaaactttgaaagcactcatactggaaagtcatcattacgttagcatttgcactgaggagtttggaagtgaagaaacctgattagctttgtctaacctcatgttgctcccacttacttgacctcgagcccaactgcaatgttatatggaacacactttggtaaagaaattcaagtctgaagtaaactttgaaaaccagtctaggagatagcatagttgactctctactgtagttgttgagaagcctatccgttgtgtctctgggaacatcagaagataaagctataacaggtgcccacgtaggaagcctggatttttcgcacaaaagtaacttttcatatgctctagtggtgaagcagttaccctgtagacccagaagccagaatgatttagtctgaaaaatctaaagataggtattaaattaactctcatgatcatagaaaattctttgcaccatttttgtagaatatcccaccgaataacttggcttttcacccaaaccaccaagaaaaattgccaccagtgacttgatgcaattaacttgctatcgggagttctttcttgtgaaatgattgaactttgaaagatgtttaccaaagacagcacctttagcttcatcacaattactgtggaatctttctttgtaagtagttagatgcaaaggccagttgttgcttgaggcctctcctggattgtgattttaaagtgtatcatcaacacatgggaagatatttctccctctttatcttatgacagaaatgcaggtatagctttcatctcaaagtaagattaaggtataagttacaaagatgtgtagctactatatggtcctgtgtaatgctacttgaggaaggctgttcctttcctggcactgaaattttagagcttgcataatcagtatatcaacctcgtgtggcttggtgcttagcaagtttcagcttctagagcccatggctaatggagccatccaggagaatgttggagagataggtctgaagccttagaagagaagtcttgattaaggagtaatgagttgcgggaaggggtcatggttgtggcggagatggaagcctggggagaggacagagacctcctaggaagagagtttgtgtaagaagaagaccaaggacctcctgatgtacttgattgtaattgggcatgagcagcccagttagaaatggtttcctgttggtattacatatgtacatggatggcttctgcagatggctaaactcacccattttatttttttactatcttaatagttaaaatatgaccttttcttgtgtctccaaattctgagttaccttatggtgctagtctgtctgttgtaactacaagtcataagtaaatccatatgattcttttcctgtaatttcctggtaaatcaaggcgataatttcaaagataaaaatctgtatttttagctttagcagtgagcatgattcccagtctttttgccttcgagtaaggtttgtttccatggtggaagtaaacaatatcccacactctagaatgtgagctcttcaagggtaagggacagtgtcctacatatatctttatctccacagcactgggtacataaatgtgtcataaaaatgaatgggtaaatatcctttggagtttttctgttacttgatgggtttttggggttgattttcaggtatctcccttgtttttctcatttcttacattattttctttcccaaaatcccttaatatacctgtttagtttgtgatgtcattttccattagactgaaaccatccaagttgtttaggctaacccagacttaagcattttctgggcttatttttggactctttttaaaactcatcatctgaaaatatttaatgtccacacggataattctgaagacatgtgcataccatttttcttttatgtacatgggttaaaccttgatttttccatagtaggagaaagcattataagattttattgttttcactggggtaatatcttttgtgctataagaaataaaattttgaatctagaacttagttttttataagacctttattgagatataattctcgtaccataggagttacccatttacagtgtattagtcactgattattagttaataggttaaccagtattagtaatcactggttattaattacagagttgtgcaaccatcagcgcacaattttagaacatttttatcaccccccaaaagaaatcccatccccattttcaagtcactcctcgtttctcctgcaactactcttttcagccctagcagtagacaatccctgatctactttctgtctctatggatttgcttattctggactgttaatgtaaatgaaataatacaatataaagtcttttgtgactggcttctttcacatagcgtaatcttttaaaatggtatctatattatagcccgtattagtatttcattctttctttaatgctgagtaacatttcattgtatggatataccacattttttaatctattcattacttgatggacatttgggctatttctacttattgtctgttatggataatgcagctatgaacattcatgtacaagtaccggtaattattttaaagaagttattctgggctgggcatggtggctcacacctgtaaacccaacactttggcaggctgaggtgggaggatcacttgagaccaagaatttgagaccagcctgggcaacatggggagataccgtctctacaatttttttttttaattagccaggcatggtggctcatgcctgtagtcccaactactcaagaggctggggctggaggatcacttgagcccaggaattcaaggttacagtgagctatgattacaccactgcactccagcctgggtgacagagcaaggccctgtctcaaaaaaagaaaaaaaaaaaaaagattctatagtttctgtcattgtaatagaggaggccataggatcatatatggcaagagtatatagcagtgcatgccagggagtgaaaaataggccatcaaattgaagttactgggagaacttaagactaagtctaactacgcatgagggattgaagccgggacacacaaagcttaaaattatgattcttctagagactgttacggctttttgctgaccacagacaatgaaagtttgatattttgctgtatttgtctgaaaatggaaacacacttttcccaatggcagtattcctgaggactagagttcttcacctctaaaacctctccaatcctagtttttccttttggctgatgatgaccagccactgccatttttgtcttaggttttgttagtctgtcttatttccagttataagtggttaaaatttcttatgaattcttcttgtgttgaacttttgattaatacatttagtctatagacagtaatgaattagcatctgatcaggaatttgtgaaaaacatctcagtcattaaagattaagaaactgaagccaattaatattgtcatgttctgtctcttggaacttgagcaagatacagatctacgtgtcaatgacatatccagaaaatagactccacctagatacattaaccctgtacccttggtccacatattttatttcagcaatgatccatggacatattataatttgacagtttcatcacatacctagcgtattgggtcaaatcaaggaaatctcatcctagtgatcttaactcagtgatttcattttgcccagatgttcagctgtgataaactttactaaggcacagatgatggatgatacacaataattccaaaatttgggggtggctacaatgtggctaggggctagaactcaggtatctacaggacaaatactgagtgattagtcactttctaagcgctagatatgcatatgttctgccaagctcagtaggtctaagtagattgcttccatttcagataattaagtgctttctttttataggaagtttttagcacatctgaggttctaaatccaaaaagtaaataatatatagagaaagaagtaataacaataataatagtaaccaacatttattgaacacagtatgggctgggcatggttcaaagaaagtttgacatatagaatgtcgaccatactggcttaataatcctcataactgaattagtgcttaagtcagttgcccagcctcagcaagcagcagaggcaagtaagtcataaatcaagatcttctgaatccaagaccatctctcaagccttgttctaattctctcctcagccatggatggtgaaaggcaccacaaaggcagcgtgtcaaaaagtggcattgttcaacctttcccctgatggggcaaagcttttatttttttcctttacgttctttgacatctgttttaaaatgcagatatcactagaagaaatgacaactttattataaaatcccagtaaaatgtaaatgtcttatataaaacctttatactgagcaaatttcagtaggaaagggcttggaagtaaggctctgaatgttttaaagggggacagtgctaagaaatgattagaaacaagagcctggaggggtcctgccatttttactgttttgcttaaggctgacctaaaatatgcatagtcttacttctcaccctgtgagcttatccttattaatgtctttttccacctagtttaggggtatttttgaatttgtgtttgataaagatgtctaaagctgtactgtaaaattttattgtcacttttttttttaaatggagtctccctctgttacccagcttggagtgcagtggcatgatcatggctcactgcagcctcaacctcccagactcaagcggtcctcccaccccagcctcctcctcctgagtagctgagactacaggcatgtgtcacgacatatggctaatttttttcaatttttttgtaaagatggtgggggtgtctccctatgttgcccaggctggtcttgaactcctgagctcaagtgatcctcccacctcaacctcccaaagtgctgggattacaggtgtgagccattgcactgagctttattgtaatttcaagggctcaatgcaatttccagtttttaaagttcatcttgcttgcagaatttgtctttcatttaaaaaaaaactgctgattggctacatttatagctgctgtaatagttctgtatgatttactacatttgcctgaatttagattggtggatatgatttagctgcttttaatattatatgagggtaaagccagatttctttggatctattccttttagatggcaatctttgtagttgttctactttacaaaataatccctgtgtgtgctcatgctttggtatacagttaaatgtatgatactgttaagaaaacattgatcactggaaagtgaccttcatttctttatttcataaatatcattatacaactatataactacacgtagtagggaagctccatttaaagagtagatgacttacactgaaatcatttgacctttgtaaattagtttaaattacacagagattgttgtaatgttctttatcatacataatagttacgattgctagagaggcactcataaatcattgctaaaagggccagctgctttcatgttttcagcaggttgagttaagggaacaagccttgccaatttgattaatctcttatgtccattagttggttgggaagtttttttgagtgtaaatttgtatgtagacaacagagtttatattctttatgacataaaattaatcagatatatctacatatttgtagaatggggggattcttagctctatagagaataagaaatactggatggaagactttttttaggatgactggctacaggaagaaattgtagtgacagaagccatgtgtattgaatttgaattaatgttccttagggagctaccagagaaatataatttacaagataatcaagaacgtaaatagattctctgtggagtcgttgtctgatcactgacatatattcatctgtattgaaatgacttcatgactacattctaacaattagagaatcattaggggtgagatgtacgtgtataccttcaagaaaagcaaaatatgtattggtaataattgacagctgttaaaacgagtgcattgtgtacttgttaaacattagaggctgggcatgttggctcacacctgtaatcccagcactttgggaggccgaggcaggcggatcacgaggtcaggagatggagaccatcctggctaacacggtgaaaccctgtctctactaaaaatacaaaaaaaaaaagccgggcgtggtggcgggcacctgtagtcccagtgactctggaggctgaggcaggagaatgtgaacccaggaggcagagcttgcagtgagctgagatcgcaccactgcactccagcatgggcgacagagcgagattccgtctcaaaaaataaaaaataaaaaaataaaaaaaaaacattagaataacttaccttggaacagtaactctgagggaaccttgatcatttatgagaatgatctcccctacgttaatactgcatcaaaactaacattatggtatacctcaaaaagtattggcatagatgtttttaaatataagaaaattcaaatgcgtaattgataagggctaaatggctcaatttcccaacccctaacaaaaatatgccctaacacagctctgtgactatgactgcatttattagaaaacatttagtaaaaatcatctctagttcaaaccctccagcatcagttcttcttgataattctcatgaacatttagaaataccttaaaagagaattcagactcaaatcaaaaaaccttatttcatttggttgcaggccaagatacctcttttaaccatttctggcttttagaatccttatcatgacagcttgtcctatctcagagcttcaggaggaaaaactagtccctcaaaatcaagtttgctattgagcttaataagaggtttctgtatgtcatatgtttgtttagaagaaaagcacttgttcgactcatttaatcctggcctgatgaattaaggcttgaattaatactgagggaaccttgactatacatctacaaaatcaatgtgtcctggtaggcttctgattaagataacattagctcttgcttgaaggcatctttctctgctcctaccatttatccagtggtagataatatatggagtgaaaaatgaaaaagacatagctgggctttaaagcaagatgaacatctctgtgaaccagaaatgtgaaagaaaaaaaaaaaagtaagtggggctaaattagtgggctttcagctcgtgctgtagtaacagggattaaaattctccttacaaggtagtggcccaaagccaggattactatttgaaatcagagccccacaaaaacacacctagagagagacacatacacacttacacttaaaagcaacatgaaaagaaacagtttgctgcaagggtctacagcttatatgcagctatggccctaatgcatagagccgagggaagaggcaaagattcgcagttgggaaagagagcatcacagccttgaaaccaggacctgaaccaatctacctactgcctggcaatgaaatgagtgatatctctgtatcactcagtgtaggagctgcaaactaccaacagatgtggctctaaactctaagcccctgggtatggctgggagaagccataaaaccacctgagagagagataatgagtttaaaaagagaggaaaatattaaagtacacacacatgagaataatagaaaacatacacatgcatatgtatgcacatgcaaaacatcccttgcaaaatttgtctccaaatcacgatccaaaatacatgaagaaatgggatagcaccccccacccaagttaaacatcaaaaagtgaattaggctgggaacagtggctcacacctgtaatcctatcactttgggaggccaaggtgggaggactgcttgtgcccaggtgtttgagactagccagggcaatgtagtgaggtgccatctttacaaaaaataatttaaaatatattagccaggagtggtggtacatgcctgtagtcccaactactcaggaggctgagataggaggatcgcttgagcccaggaggatgaggctgcattgagccataattgtgccactgcactccatcctgggcaacagagtgagaccctatctcaaaaaaaaaaaaagatgaattaattctagaagaaagcaaaataatacactagtacaacaaagatttttacttacatttaagatgctcagaccaggtgcagtggctcacgcctgtaatcccagcactctgggaggctgagatgggtggatcacctgaggtcaggagttcaagaacagcctgcccaacatggtgaaaccctgcctctactaaaaatacaaaaattagctgggcatggtggcaggcacctgtaatcccagctactcaggaggctgaggcaggagagtcgcttgaacccaggaggtggtggttgcagtgagcggagatcgtgccactgcaccccagcctccatctcaaaaaaaaaaaaaaagatgcttaaaggcataaataaggggtaccactcgctaaaataacaagaaactaagaaacagagatggatgaaatgtaactaggtctgaaaacaaagatatctttgccaaaaaaactagtcattgaagttactaaactcaatatacaggataaattctagactttgtcctgtcagagaaggcaagggaattagaagatgatgctgagaatgttactgtgtacaacactcacagaaaaagataagaaatataaatgagcaattaggagaaatggagaattgaccacaggctctacaatataccttactagaatttagaggtttgtttaggagtgtatttgagaggtttcagaagaaaatggaggaaatggtagagaagtaatatttgaagctgtcatagctgagaatcttccagaattgaagaaggatgtgagtcttgaaggaaatgtgctcccaagagaaatttcaaacatctgggaaggaaagaaaggcctgcattgagcaattgatattctttacagctcagctttggctgattaaaatgagccttttctgttttcactggaaaccaccaaaacagaaatgtaatgtgttgtatataccaaaccatgcctcttgaacaagggtccttataaataaatcataaaagaagagccctgtggacaactaaacccacaggatcaagataccaaggaagatctctctagaaaaggcagtctcctgtcagcacctttgtgaaaaataggtgggaagacagtaatggcttgttgtaccatcttgaggtccatgtctaaaaactgttttcaaaaggaacaccatggctgccccaatctggtagaaagaaaaatttgaataggattctacataaaaagtgttgccagttagaacattttgttgaagttttcttttaatgaagagggaaaaatagaaagtaattcctatggaatgagaccttgtgaacattggatactgcttcaagttcacagaaacattgaactgattgccagttaagttctcagaaattagatttaattaatgtggacagttacatacatcggtgcacacccagaagacccgtgtgcagaatctgactgaaggtgtacttacttcgatgaatctcttctcatcactgctttgtcaaagcagattgctatgaaataaactatacaaacaactacccttgaaggctgatagcaataggatttcaatcagtacagataggagattctatttctgtagatgaaaaagatcatacattgattttctgtgtgactttaaataaattcctggaaaccttgtaatgttaggtactaggtagaatgaaaaaaatgaagcaaaacaaaacaaagaaaaaaaccagagtagattgggttttctttctgcttccatgtggagatctagccttttgaaactgagcattttggaagacatgccgtcccctgtggaatgttcattccgagtatgggacaacagaaaatatttagcagacctggtgatgagatgatcttgctttctcaaactggacaatgggaaaactcttcttggctactcactacttacatttcatctcttttctcattgatatagatctcccacatttgtggataggaatttctctcacctgatgaaatatcatctgtgaacaacagaaatctgtcatcttattttggtatttatcacaagtagaagaaagatgtcaagagttctaatcagtcactggatatcaaatatcagaaatgtcctcaattggaattgtattctcagtaaatcctaaagcatttgggaccttcacatgtgctaatactgtttatatttatttggaaattaaccaaatataaccaaaagacagtggaataaccatagaaacctttaaatggaataaaatttatggcaatcaacattattaggaagaaaaagtatactacctagaaacagtgcaagaacaacgaggatcttctgtgcatctaactatataggtctagaaatatataaagtgaattatgatagaattaaaaggagaaactaacaaatccataattatatctcaacactcatctaacaaaaattgatagctacaaataatcaaaaattaataaagatatggacaattttaacaacaaaatcagcacactatgtatttagagactccatctttccaatggaaaaatacacattatttcaagtactcaatgaacatttttagaaagtgactgtgaactaggtcacaaaaagaagtattgctaaatttcaaaggatcagtatcatacaggggttctctgattgaaacgcaattaaattagaaatgcactaagaagtgaaaatggaaatataaccactgtgctcctaaatgactatgggttaagttaaaagaaatcacagtaagaattacaaaacataaggcactgaattgaatcaggtgatgtatataaaaacttttggtatataattaaagtggtaccaaggaggaaatgtataaccctaaatgtgttcattaaaaataaaaaatcaatgacttattcaacctgtaaagcaagaggaaaaaaaagagtaacaagtaaaacattattaatggacataaaatgagaccatagtaagtaaggagcttcactgcattcttggatgtgaagactcaattattatgaacttagttcttcccagtttaacctatgaattcaatgtaattcaaactcaaaatttcaacaagcattttcataaaatcagaaaaccaaacactaaaatcatggagaagatcaaaggggtcagaatagtcaagacaattttgaggaaaaacaaagtgggctgagaaggcctatcagacatcaattgatttaaagctggagtgtgggatctaccagggatatgcagatagaaccacagactagaatacagagctcagaagcacacctgtatatttatggacacttgatgttttgcggaagcatcgttagagatcagtgggaaatagatggaccatacaatgaatgaggctggcttcatagtttatccatgggggaaaagtaaaattagatcgcatgttcacggcaagcacaaaaatagattctgggtaaattcaagtcctaaatgtgaaaaaccaaattttaaactttaaaatgtaggtgtaagaaaagattttcgtgaacaaaacataaaaagcagagaacatacagggatatgttaaaatttacatcttttataccataggatgccataagcaaagttaaagataagctacactaagataagggtagaagatcatatttgccatgcacataactaacaatggattagcatctagaacatatccaaaggtttaaaaagaaaaagacaatccagcaggaaaatgggtaaaggaagcatgaaaagccagttaacatggaagaagtctaaccttgccagtaatccgggatgtatgtgcaaattaaaatgcacccatcaggttaactaaaacttgaatgtctgataacaccaagtatttggtgaggaggtgggccaaatggaaaacctcattcactactgaagcgagagtaaattggtaaaagcaccgatttgtcacccagagcgattcggtgacatgtagcaatgttgaagatgttgctaagatccaacaattccacatcaaactatattctgtaaagaatctcttcaacaggtatccaaggagataggtataaaaaagaatttcattgtatcattgtttataatagtgaaaagttggaaacaacctaaatgtccatggacaggaaaatgttggcatattcaagcaacagaataataataccttatggcagttaaaatagcaaactattatgtatcgacctggagaaatctccaaaatggtgttgaaggcaaaaagcaactcttagaatggtatgtatattcttaaatgtgaagttcttaaatttaaagtttaaaaacatgcaaaataatgttattagattgaatcacataaaatgggtgtttttgtaggtgaaagaaaaatacaggcaaacatcagcatcttttttaagctcaacctagtatttgttgatacattcatggtaacactgggcatgaaattcagtgtggcattatctccttgagggcagcggggaggagagaatggtatggtgttgaggcgggcatgtgagggagcttctgctttggctgttaacttttctttcttcaaaaaacttttgaagaaaatatggcaaatgataaacttatcaaggggaggtgataggaacatgggtatacttactccattcttatacatttctgttgaaaatatttgctaatgtttagagcaaaccaaagtgttgatagaggtataaaatttttaatctcatgacattataaagaaatatttacaaagtgattaaatcctttgctgcttacttatctgaacataccagtcgcgaggcttttagtgtaacataaaaaattgaaaagcatggctcccttcacacaccaggcaaaagcttcaaattttgttttgttcttttagcactggtaagattgtcatcattaaaaccattcattagtgcctcttttgcttgctgttcttcggtggcagtcagatgcatctatctaccatggtatataaaatttggtgatgatattcaaattactttttttcttctttttctttttctttctttttttttcttttttacttttttgatgccaataggaatctgcaagcagaatatgaccgtctaaagcagcagcacgaacataaaggcctgtccccactgccgtcccctcctgaaatgatgcccacctctccccagagtccccgggatgctgagctcattgctgaggccaagctactgcgtcaacacaaaggccgcctggaagccaggatgcaaatcctggaagaccacaataaacagctggagtcacagttacacaggctaaggcagctgctggagcaagtgaggagagagatgggatttttacaaacattcatttttccctcttaaacaaaactaaacctcagagagcactttttataggtgcaacaagcatcaattcttaagtgcttggtatgtgcctgcaaagtgatagtatcaaaggatagaagtagaggagatagaaaaactagtgtgtcttttttgtatttgtccaatattgtttcctaccaaaatggttttttcttgaccaatttgaaatacatcttggggaaaaaaacgcctaaaggtttccactagttctctaaaagtgaatatttcacttcttgaaatggaactatttcatttacaattagttatattttctggtatacctttgtgttttttttctcctaatccctaacacatagttctttaagcctccatcgaaaacctagcaagatactgcattgtaagaggacctacctggacatagttctggctttctgggaattttaaatttttcaattatgttctctctatcttgttacttaatacttcacaaagatatgaatcttccattacagttttgagatctcacatagtctcatcattcacacatgaccttctaaatcttccagttatttaatgtaatgatgtatagtctcattccagtgtagctctgatttttttctcaaatttataagggagcacaattcagatacaaagacagtttctatggattatatcaacagtgaaatatcccaaattaaacaatctttgggagggcttctaaagtaggaagggtcaaaatttatgagtcctgagtgtgtatcatattttgaaatttatacatttgtatgtttattatgaaaagtaattctgttttcttttggatgacttagccccaggcagaggccaaagtgaatggcacaacggtgtcctctccttctacctctctacagaggtccgacagcagtcagcctatgctgctccgagtggttggcagtcaaacttcggactccatgggtaagtgtcctagctactctcagattttgttgtctgaagaaaggtagagtcgtattacagggacatgaatatttggccgtaagtgtttgactcatcttggtatcagggagccactgaaaatcatataccaggcgaaaaaagtctaaaaagaaaattctaaaaaggtgtattctggcagctctatctggcccacagaaaacttgtataggtgagaagaccagttaggaggcaattgccaaggccaagattggtgagttctgagggcctgcacttgagagatgtgggaggagaggactgtgagactattctataaaaatagacttgccagggggctgggcgtggaggctcacgcctgtaatcccagcactttgggagggtgaggtgggcggatcacaaggttaggagttgaagaccagcccggccaatatggtgaaaccctgtctctactaaaaatagaaaaattagccaggcatggtggtgggcgcctatagtcccagctactcgggaggatgaggcaggagaatcgcttgagcccaggaggcggaggttgcagtgagccaagatggcaccattgcactccagcctgggcgacagagcaagactgtgtctcaaaaaaaaaaaaaaaaaatagagttcccagggtctggggactgagtgcaaattgtaagaagaggaatgaagggagaggatttggttggaagaagatagtgaaacttctgattgtggacataatgtgtttgagaaattgacaggtcttctaagtcatgtcccaaaagaaattaagatacagatctatacttgaagtaagtgggcaaactggagagatttgagaatgagtttcatagaattgattgctgaagggtgtgagatgagaaatctataaaatctataacacaggtgcttcgatccagtgccttggaaaagacctccatttgggtaatgggatagtaaaggatggataagtagggaggttcaaggaagatgtgacaaaaaggtgaaatgctaaagagagctcaatggaaattaaaataaatcacagtccattgggtcactataaatgcattgggtaattttgagaaaccattttaggccaagagaagggaaggtggaaaacttctgtttcaatgaaatgaaagactaggtaatcttaaaatgaatgaggattaaggaaagtgaagacaattttgaaacattaccaagtaagaaggaagccttaggcaaaagttggatgaatttgttgaggaaatggtccacatgttctgttctcattcttagcaatgttctctgcctaggactaggttctaagaaaggtggagctgatgaggcataaatgatcaaaggtcaaaacaagagtagggcattttacagtggtaatgaatggctaggacaggggttcctagccagctgctcattggtttttcctgctgtgtctggctagacaatagagggttttatgaaggccacaaatacttggtcccccttcctcatttctctttctctgtaaaggcccagtaggagtcagctccatcctctctccttacttttccctgggacctaaactggttatatacttggtcctctcaaatcttacctcacagaatagaaaagacctgtgactccttgattccatacacttacagctctattgcctgatatgatgatgtgttcaggaattcatttcatacttgagctcttccatgagggtagaataaagggaggcaaagtgccttaaccaaaatggataggacagaaaggaaaagtcaggggtgtgggtgagttttatggcgaaaaatttggagatcacagtcgggaaaattcaaaagttggatatcatggaagtaaaatactttcaagcaatttctacatctaacatggtgcctcccagcgagctgctgaagattttacttggagatcactgaggggtagggagtacagttcatggagttgatgagaccaacgttgctgagcttatcagcagaggggtgaggtccagatcctgacgacagtggtagatcaggatggaaaagatgttgaagaagatggacgagggctctgaggagatgaacatttctgaggaaagagacagggtagttgaaataaatgtgatgaagttcaagaacctggagcagtgggaagaggcacatcctcctctggagaagccaaatcttgtaggaaagccaggttttgatttttttgagaaggaaaaggatatgtttgaggttattttcctgaatttactacacctccatgatttaaggcaatctctgtgtcagattatctccctccacctgagatctgaatatagctaataaactgttgggattgtaaatgacaacacactacatgaaaaacaactgtatgcatttgcaaagtctgtaaattctgaaaacaactgagctttagtacctcttatttttttctacttcaggattttcccccttttttaagtaagtaaagcatatgaaactaagttacatattttagtggtcagattcagagccctgggtgcttagaagcattaataattatttaggtcgttgacaatggcgaataggcagcatactcgttaaagcactcaaattaaagtgcacattaggatgtggtcctgatgatctgtggagctaaaaagatcatggtagaactgaataccaggacaaaagtgctatattccaatggctaagctaagagataacttgctggcataaaatggataagctgtgttaaatttgtcctctgaaagaaaagactgaattcaagggtactttttcttgaactgtgtattaatctgttttcacactgctataaagaactacctgagactgggtaatttatgaagaaagaggtttattgactcagttccacaaggctggggaggcctcaggaaacttacaatcatgggggaaggtgaaggggaagcaaggcatgtgctacatagcggcaggagagagaaagcgaggggagaactgccacacttttaaaccatcagatcttatgcgaactcactatcatgagaacagcatgggggaaaccgccgccatgatccagtcacctcccaccggacccctcccgcagcacatggggattacaattcaacatgagatttggatggggacacagaaccaaaccatatcgaactgcataagctaacttcatttaaaaaggaaaaaagccttaccgtcttcttgaaggatgcacacaggtgtttaaataaatgcagtgtatatacttgggctttgaaggtttgagatacaaggctgggatctgctgaaccacattctggatagagctgcattctttaaatatgcaaccccgatgactgattttcttttaagtgaaacatgagacaagtcatattaggtgatgtgtctaaagagtcaacatatttcctcaagccatgaaatacttatcactgagtctctatgtaccatttgtattctgtacagttcttactgagacaatgtgctaatgaaacgtacattctattggaggaagcaaatacagaacaaaatagcaattaacaatgtttatcccctattggctctcatgggctccatatacaaatctgtgatgtccagacaactccttatctctgatgactcctaactttccaccagattactgttttttgaagcattttatattttattgatttaaaaattaaactgttcctttgctttttaaaaaatttatcatgtacatttgaggtttatgacataatggctccctagctttttatttagaacaatttcaaacttatggcaaaactgcaattaattcaacagtttgccacatttgctttatagctatttatttatgtacttttacattcatgtgttgttaaatggattgcatatatttagattaacatgtatatctgtatgttaacatatttttatatactgtatatgtttatattttatgtgcatatttaatcatattcatgcgtgtatatagtttgtggatttttttttcactgatccactcaatggttaggtttcatacataacacttcacccctaaacacttgaacacgtgccttctaaaatgaaagatattcttgcataagcacaattatcatgctcaaaaagaacaatactgttatataatgtagaatttaaattcaaatacctccaattctgccaattaatattcttcatagcgatattttacattcaggatcagtgatgtccctgtagtctcctttaatctgaagcactttcccagcctctttaaatctttcatgacattgatatattagaagaggtcgggctagatgttttgtagaatgtcccccaatttgaatttgtctgcttgtatccaagtgattgggttcgggttaaatgttttatgccagattaccatataggtaaggtatcctcagtacatcacatcaaggttttcctcaagattctccatccccttcaccgttcttcactctccctgggcgctccttccatactttggcttctgctatgctgacaactcttaagtcaagatttccagcccagacctcccacctgagcatcttctggataaaattataaataaaaatatagcctaatctgaaatcatgatcaacctttggagcatctcttccaatttcccaatctatacaaagtcattttctaccccttcttcctttacctgccttccttagctatgttccaccaccatcaatccagtcaccaaggtcagtgtgttttgctacttatgaaaaagagcaaaattcttcaattcagctacttctgcccaaatttagccctcatcatgtgttacctgaacagacaatatgaatactttcctaattggttcctctgcctttggtctctctccctttctaagctatcttccagaaacttcagttcctcttctaccattcaaattatatcatattattcccctctttaagcattttatgccttctgtttgacaacagaataaatgtgctctttggccttgagtacattatgttcttaacctgaaatatagcatcctttcttttcactcagtgagttttcttttggaacttaatcatgcattatatcattctggttttgttgttgttgttgttgttgttgttgttgttgtttcttttgtgtgagacggagtctcgctttattgcccaggctggagtgcagtggtgcgatctcagctcattgcaacctccacctcctgggttcaagcgattctcctgcctcaccctcctgagtagctgggattacaggctcgccaccatgcctggctactttttcttgtatttttagtagagacagggtttcaccatgttggccaggctgttcttgaactcccaacctcaagcaatccacccgcctcagcctcccaaagtgctgggattaaaggcatgagccaccacacccagccatgttttcagccagttactagtacttctttcttctgcctacaactccctagaacttaagctccttaaggacaggatgtaagtcttgctcattgtcgttactgtatgaggatactctgtgcaacaaacaatcagtaaagtgcttgttgagttaatattttagaaatcaagcataatacattcttgtgtacacatggaacagcccacacgtttaggaaatttagctactagtttcagtatctttcaccaccattcacaactgatcagctaataatcagcaacaacattgtacaccataatatgttaaaggtgttacacacagaatttatgtgtgaaattgaaagcatcggtcctatatcatatggaaaaaaattaattgtagccaaatgttgggtattggatacatcagtgtgctttttcttctaaaaaatactggagaaaggcaggaaatacacaagtactaagataataacacatcaagtcggaaactggttaaaatccaaagaaaaatgttggtgggcgtatttgttcatacacagccccctttatgagaaaaaataatttcttgtacacagctcctttttaaaaaaaagagaaaataatttgtttagattcagacaaaaacacaggagtaattcttgtgtctattctgcataggctgcgtaggttctggctaaaatcactttttaagcagatagaaccattatcagcgtttgaatcaaagggaagtgagtcagatgggatatcttcccttcaagaaagggatctgaaaccatcgttatatttcagaagactgaagaatatcttgccatggcaaagcattccttttcttttttctcggattaaattgagtcatcccacttcttttttcttcacttcagcagtgattaaaggagactatcatattttgctatatcacggtactatttaactttgactatgtctttccttattttaaaaaatgtttcagtgatttatttggaccacaatcagacaagccaggaagaccaaatagctaataatccaaaaaacattatttttctctttttattatttcagtagttttcagggaacccaggtggtgtttggttacatgaataagttcttcggtggtgatttctgacatttgggtgcatccatcacctgagcagtgtacactgtacccaacgtgtagtcttttatccttcacccccctcccacccttccccccaagtccccagagtccatggtatcattctcatgcctttgcatccgcatagcttagctcccacttataagtgagaaagtacaatgtttggttgtctattcctgagttactttacttagagtaatggtctccaactccatccaggttgctgtgaatgccattatttcattcctttcatgactaatattccatggcgtgtgtgtgtgtgtgtgtgtgtgtgtgtgtgtgtatataaacaccacgtacatactgcattttctttatccactcgttggttgatgggcatttaagctagttccgtatttctgcaattatgaattgcgctgctataatcttggtatgcaagtatatttttcacataatgacttcctttcctttgggtagatatccagtagtgggactgctggatcaaatggtagttctacattttagttctttaaggagcctccatagtgttttccatagtggttgtcctagtttacattcccaccagcagtgtaaaagtgttctgttttcaccacatccacactgacatctattatttatgcatgtttgtggaaatcaccttggagtagagtcaagtttaagtgttaaagcattgccatcaactaagtttaaaatcccccaaagactagcaatatgctatttgagcaggcaatgaatctgtgaagtagggataagggctgtgcaggtctctagtgtgcaactggaactcagtattttcttgttgaataagtgaaaaaagtgaaaaggtgtttttgtttttggtgatgaggggcttgtgatgacaggtattattgttagagtcagaaatattttgaggttgcctattaatatggtttggctctgtgttcccacctaaatctcatctcaaattgtaatccccacgtgtcaggggagggacctgatgggaggtgactggatcatgaagaagttttcccccatgctgttctcgtgatagtgagtgagttctcaggagagctgatggtttttaaagtgtgtggcacttcccccttctctctctctctctctctctctctctctctctctctctctctctctctctctctctctctctcctgctgccatgtaagaggtgccttgcttcccctttgccttccaccatgattctaaacttataatcatgaggcctcctgaggcctcctcacgcatctggaactgtgagtcaattaaacctctttcctttataaattacccagtctcaggtagtatctctatagcagtgtgaaaatggattaatacacctattatgttgtagctacatagtgtatgattagacaagccataaatattatatctggcttgtttcatgcccataatagtgtatcagtcagctgttgctgcataacaaataaccacaaaattctcaagttgcatatttctcattcacgcatctgttgtttggctgaacttttgctggcaatcagctggacttgacaccaagttgtggtttgggttcaggtctgttcaacatgtctctcatccttcttgggctagcaagctacctgggccatatgcttcttgtgcacataaacacaagcgggcaaccccaaccagtcaaagacattctaagcctctacttttgtcatgcccgcttacattccattttccaaagcaggttatgtggccaaatccgaatccccaggccagggaagtactgttttcccagctcttgttcactctgctttatctacattagacttcttgctgtgcttgaggaagccagtcacactctcctctcagagtctttgcatttgccaatccttctgtctggagcacttttccctcaaatacttgtgcaactcataccctccagttcttaaagcttttgctcaactgcatctcatcaatgaggacttccaagactccactttctgatgactctcattgtcccttgctagccctctcctcagagtgttcatcaccactcaagatacctatatagtttacttatttacttgttaagcctgtgtgcctccttatgaatgcgagtttcacagagagagtgtgtgggtggggtttgtttgcttattgctatatcttcagtgaacaatatgccaggcactgttcaaccatttgaacagtgcctggcatatatagttggattttaataaatatttgaataaataaatgaatcttactgtttttaaacttttgtggtttttaaaaggcattttaaaaatctgggttagtatcaaatattacaatggtattactttaacttcaggtttcatttagctgttttaacttttacaatatattctgacacagaaaatattaggcattaagcatttttcaatgagttgattcacttctactcatgcacatatgtgatgtctgatttcgattcttaaaaagagatgagcctgggcgtggtggctcacgcctgtaatcccagcactttgggaggccgaggcaggtggatcacgaggtcaggagattgagactattctggctaacacggtgaaaccctgtctctactaaaaaatataaaaaattagccaggcgtggtggcacgcgcctgtagtcccagctactcaggaggctgaggcaggagaatcacttgaacccggaaggcagaggttgcagctagccgagattccaccactgcactccagcctgggtgacagagcaagactccatctcaaaaaaaaagaaaaagagaaaaaaagcaatgcattaaaaccatcttgagaaatcatgaaaatatggagaaaagaagaaaacaagattatactctacttgtttttatactacctagaatgtaataggcactcaaaaaaatgtctgaatggatacaattatcactgccttaaaagttttccattaaagcaaagaagccaattttacatttgtattatacttggacactcatattaaagactcacagagagtttatctggaaaaataaacttggctgacatcattaggtttatactttataatttgatctttgaaataattcaggaacaggaatgccagtcacttcattgaactgtacctgaattttaacacagtacaattgagttcctagagctccaatatgatgtaattaaactgtcagaaatattaacatcgatgttcatgagcgtcgttcatgatgttctcttggttctgatttattcagtgaggcatactgtcactgaagtggacttactgccattaaaaatgcctcatgtttcccagttccgcaaaaatttgcatcagtaatgaaacagagagatgtaatcagccctgcagttgtcaggatcttgatcctcttggtagtatttcattcatttcatcttcaccagataatggtagtttaaaaccgcaagaaaaatgaaactaaaaatagtgaatttcacttctttttctaaaggcataaacttaagcaaatagtgcatgtgtgtgaggggggaggaagagagagagaaagaggagagagagagtttgtaactattccttttctgctttgtgaccttaattcttcagcacccatttcctgtacttaatattgcaaagaggtttcctgtggtatgttaccaggagactcatgtagtctgaggctttttatctaccttacgttcttatccctccattctaataaaaatatgaagcctcacatccacctagaatatgattttgtcttaatggttagcattggcaatgattcttttagcttctgctgttaaaaaaaaaaaaaggaataaatgcaggattctaatcaaacatgaaaatccaagtggcatagaccaaagggaatgagaagcatatttaagtcatttagtcactggcttccgaagcagttccaagtcagatgtaaacctgaggttgtccctaattaagttcattatggttgacttgctaaagcaaggtcttgttttagatggaagtgacaatgtgcaaaacaaacagagcttgaatagaagttattttcactattggaagattgtatattatgaaaagttagtttcaaaggacctttaaagtttaattttgtttgcacctaagaaatttccctttaacttgcaaatgctgtttgaagtgtatttctttaacacatgaacaaacaatacagacacagattcacaaaatctacaaggagatttccattcccagtgaatatcatccatccataggtttctttgcttccagatcatcattctctcctcacataaacagtcaaaatgtttgtaatgtcttctttataaaacccaaaacataattatgataaagtagtcccaagtaacagaggaaaggaccataactctccaatatatgccatatctacagtttttagaatattcatatttcattacctatataggatatatactatttttatttctattacattggagtttaaaggtacttgagtttcgtttgtatttttggttaaatgtcaaaacaaagagtgaaaaaaagacctcagtgtctcaactcccttcttaccttcatgaagtgactgcaaagtgttcaattcttactcttttgtgttgaggagacagcactgcaagtgtgcagtaatacttattttattacatagaacaaagtttcacatttgtgaatggggcacaaaagagagcttgtcagttttacctttttcaattgactttttcttttattctttttaacttttaaatttattttttgtttttttgtttttttgtttttaaatagagacagggtctcactatgttgcccaagctgctctcaaattcctggcagcaaacaatcctcccacctcggcttcccaaagggctgggattacaggcatgagcgaccgcacccagcctgttttttactgtagtataatatttgtacatatttatggagtgcatttgatattttgttgcatacacagaatgtgttaatgatcaagtcagggtatttagagtattcattatctcatgtatttatcatttctatgtgcggggcacatttcaagtaactagtcaacttttaaaaagatacgcagtaggctgggcgtgttggctcacgcctgtaatcccagcactttgggaggctgaggtgggcagatcatgaggtcaggagttcgagaccagcctggccaatatggtgaaaccctgtctctactaaaaatacaaaaattagctggacgtgttggcgcatgcctgtagtcccagctactcgggaggctgaggcagaagaatcgtttgaacctgggaggcggaggttgcagtgagccaagatcgtgccactgcactccagcctgggtgacagagcaagactccatctcaaaaaaaaaaaaaaaaaaagatatacagtttttttttctccaagggtaatgatatagataaactactgtatggatttcttcttccctttaaagaattacttcctcattattaagcttgagggttttctttgttatttatgagcaagtgaaatgaatttataatggtgttaaaaatgtaatcatggccctttaatatctgttttctataaatgtaattttccattatttgtttttgcttttattaaggtgaggaagatcttctcagtcctccccaggacacaagcacagggttagaggaggtgatggagcaactcaacaactccttccctagttcaagaggtaagctccaatacctagaagggactcagatttgctgggatcaggccactcgcttccctacccaactggtgtgtgtattttccatatggaagccaacacgcagtatcagaatggcaatttgggtccatggtgaaaagatttgatttttaagtgtgaatttgtggtttagagtactctgaattcaaatacccgtgagggcaacatgtttccaaaaataagaataccaccctctatttgtcaagtattttacttgcttcacacattagtctgaagagttaattatgaggtgccctttactgaagagcaattattatgtgacttttacagatgaggaaattaatgccctgatagtgcctttgccagggacatatggctactacgtgctacagcaaggcctagaacaatgcctactgattggtagtggtagagattctgacttgccatctgatgccctttatatttaaaaattgtatcttactccatcatttaaatatagggacaattaaatcttcatagagtagttggttattttttacttcgatagaggaaatacaggcttagcaaagaaagacattaatatttttctttttcttcatcactttggccttgcgtattttacccccatacaaaaacagcattttaccctgcagaattttcccactggcttgcatgagcttcagatgtcttgcttcatccaagatgatgttttgctgctactgttcgtttctgggggcatttatttggtttattgccctcacataaaacaaagtcactctctcgccttccttcaacgaataaaaaggatggtggcagtcacctgtgatcaaatagaagaaaagcctagagaaacaaaagggagaaaacacaaggctttgtggccagtgattggcacctctaatgggtagcctgggagggacgggcagcaggaaatctgggctgtttgttcctctccataagggcaatgaggagggtgtattgagtagtgtgtttttcctatctttttgttcagtgtcagttaacaatggccatttcctagctatttgatgtgcaagtaaacgttgtgcagtgcacattaaaagcaataatgttctggtagagcgttgctaaggaaccgtcaggggaagctaattttaaatgtctgcaccagccatcttttcactgctgagcgccactgaagtgatgattttaacagataaaaatcttatctgtcttccacccacctccacatcccccaccgccacccgcatccccattctgactatcttaggtatctccttcttctagatgtcataattcataatgagaagatcatacacaggcttgacagaatcaggtgctttcacgtgtctcctcattactttgtcctgcttgcttttactagcacctactacgtaccagtggaggtagtagggatggaaagaagaaatgacaaattccttgccttcaaggtacttatggtcaattgcagatacagaactccaaagaaattcaaatcacagtacaatcattgattactgtatgatcctggccccttgaactggcagcttgcttacctgctctggaaagttgctggctgccctgttggcaccctgggcatttcttccacatctaaacaagaggttagtagagaagaagctacagcaaggctcatgactctgcttcttcataggcagccttgacttcctagactcctttttgtacctgagtttctggtccaccctaattagctgtaaggtgaaatcctttgcaccatctccctgtgtcccgcttttagagtccttaaagctagataccacatgggtgtagaagcttcctggaagacaagaaatatacctcctctgatatggtatttagcagtcagtatctctgatgttgatttacttacttgtatggaaacttgggaaactcaattcaggccacctggatagtgtttactaaattagtgcttacggaagaatttcaggccttaagggctgatttaagttctcaaatgtgggagaaggaagccttgtccgataccaattccattaacttaagttccggcttactcagtggtacccttgtggcctgagaaaataaattcacattcttaaaaaacaaaacaattaaatacacaaaaaacacaagagagtagctaaggtattggaaaatctggcctatcattctgtaataccatgatcttggcatttcctcacgttttgctactttcagctaactcaggctttcttacaggcctttttctccccaaattcaagtggataaaaagtttcattattgtaaaaattaggctaattattgatgcactcaaaaaagtggtttttggatgctttctttccaactaaaagcacttttgttttttaattttgaaaaatggcatatgtgtgtgtacacacacatataccgtcaagtttggcgggaacatcttaccagttggtagatgtgttcagctgatattaagcagaaattcttgagaatcttaacatcttgggattacaaagtctttcaaatggaagagccttgaaaggtcattttaacacttttgacatccaggacagtgatttctgactctgttttgatggttatccatatcagaggaacattttacatcacaaactggggtaaagatataaaataaattgtacatgtgtttatgtacacacatgtatatatacacccaccatatgtacacacacacatttacagtgtcatatgcatacaaagatcagaaacaaaagtttcatcaagtgatgccttccatactacatacagtgcatgctgtttttctattttatttatttaaaaacaaaatgctggttgcaacccactaaatggattttctgaaccagtggtttaaaaatactaatctatgtgatctcagtttttcttgcctggttgaattatctttcaaaaaaatttaaattttgagatttttgccgtggaagtttctgccaagacgttgctaatgtctcagagacctttatagttttattctaacactaccatccatgttctcattgttgtgttacaaaaaacaaagttcatgattgctacagctgttttggacagctgtttgagtaactcaaaacagatgtgagagccagaggtctgacatttagtggaaatgtgctattaaataccaccgcgtggtttacttaaccctgctagataattgcccacagaggaaaagccgtttttaaaaaacttatgctcttcataaacataaagtatatagataggtaagctattatgtacctcaaatttacaacttttctgttgccccttgccacagagttggtcctgaaggtgtcagctaacctttctttatcttttattttcacaaagagtacctggaagccaagaaaagtcaagtgccttatttatggccattcagcaggttaagttaggcttctaatcttatcttaatggctttgctaaactgttatcaaaattaataaatgagtggcatgcttctccatttagtgataaaccgatggccaacactatcctgcataataggcaatataagcaggagcatattcaagatatgaatgtgtaaacattcagctttgtgattatatctttctggttggtctctagatatacttagttgttcacaaacacttgggagatttgagtggctcagtgtatatttgaacactgaatattagccaatttctatctaatctgtctatctctaatctcttcctttgtaagtatatgtgtagaaattgaattatagtgtaataagtcattatctactttactataaggtactctctaaagctctgccattctataggaaaactacatgggtacaataaacaaacgtaatttaaaaaataaccccattaagtgatttgtccataagtctctgatcatttagcagactaacaaagatatttttatatgtatgtgcattgatgaaagaaacgctctcctagtcagtagtatggtattaggctctctaaaatgtggtaccactttatatagatgaatgaataataggagccaagataagctcttaatgcagtaaaacaatccagaaagcagttagcagtgctactatttctgctacctgtacaatctcttgcctactgacctgtgccacattatctccaccagcccatgccatcctctttttttcataccatcccctctcaaataagcccgcgtacattctatcaaatacccctaaattaccaacccaacagctttgtaaaacctaccgtcttttaaaattaaaatcttattctgtggttcttttatggaagagcaacataaagaacaaaggcagatagaaatatggtgtgccctttttcaggcaccattctgtttcctgtatgctcccacaaaggatttgagcggttatccctttaatccaggactagcaaactacatacagcccaaatgccaaatctggcccaatacctgtttttataaagctttattggaacacagccatacccattcatttacatgttgcctatagttgctttctcattaccagggcagagtagttgcagcagtgctgaatagctggtccagagaccgtgggcttgcaaagcctgaaatatttactatctggccctttatggggaaaatttgccaatccctgctttacgctattatttcgttgtccattctgactcattacatgtatagagtcacaggcttctgtgctgatcaactttcagctgaacaagattattgagctgaaattgaattgatttatagatttatattcatattcaccaaagagcctgcaagtgtggccatttgaatttttttgacttataaaataacagaaatcctaaaaagggacttattcttccttaagtattttaaatagtcagtgaattaatataaaagaggctaaaagcacccagaaacagtactgtcctgcaattccaactctaaaataatgaattacaatcaataatgtcaattttatagtgcccgaggaaattagacttctcgggacctgaccaagccctttatttagactcaggactgccccagcacacttcccttttgtcttgattcatttcctgacaacacatcacattgccagatggacactgtaactgaaggtctacagaaactcatttccaaaaaaaaataaatgtttagaaaatgaaacatatctgaaactttatttatcggtcaagaacttttaaaaatgttgtaatcaagtagcctctgttttgtcagcgtagaactagtccttttacagtagaaaatatcatttgtttttaactttttctaaagtgaaaaaaaggaccttccttttgtaatgtgttaatgagtacgtggggacccaagtgatgagggaggattttagaagagattagagttagcttggctctgggaggtccattttcataaaatatggtttctgaagaaggatctggaacataacacaagtcatttgctgctacatattaagaaataatcaattgataactgagttctgaatatggcttagtgtagaattactaaagatatgtatcattaagcattcaaagaatcatcgttacattctgaagtacataaccataattacattctaaatcacatggctttctaacaacactgtccttcctaaagatctcaagttttcaaaactagaccaaagttacatgccgaaacaagttacccacctttggcatccaaactaaagtgtgccagtgaagggcaagttacttataacacagaaggactcctcttggtcatgacccaactactactttaccaattcacttcagccagtatttatcaaataccaaaagtgtgtatatacggtacagggcattgggcatagagaggtggatgagcaacatgtggaccccgtcctcaagaggcttatagtcttacaggggaagggaattaattctgccaccagacagtattatgaaacataaagatacttttttaaaaaaaccttgctaaaggaatcaaaaagaaggggtgagtgattcatactgggatttcagccatcaaggaaagaatgatgttctcctccccaaatgatgggaacatcatttggtatggatctcccactagtgacacccacagctgaggagctagtacccatttttctccctcttttccctggcttgaggagcatcttaaatacctggcccttacgtggtcaagctgaaaatctgatactcctaagaaatcgctgagtcatgtaggaaattcagaaggaagagaggaagggagagaaggagaaagggagggaagaaagagaaggagagagggaagaaaaacttagaaactatccttaaatgtatactagaagttttgaaccctaaccttgagtgagttttgaaaggtttctattggtgtcgtagctccatacctcttcattccagactagtagttctcaaattgtttcagggagtttttagtcttcttggagccactgagaatgatgggtggaggggaaagggagatgctgtacaggatctctcacagctctgctttgaactgctcaaaatattggaattccatataagattgttttaggagatgtcccattgctatagttaaaacagtttgaaaaccaagattttaaaggaaattgcatgcccaagacaggctattgacatgtatggacagaagtccctacttttctgtccaattatgacttatcatagaacactttctcatcagagtctacttttgaaatacaaataaatgcatacagatgtaggaatctatgaatcaaggccagtgggtctttagccattgcctcgtaaggctcctgatatttgctgaattggggaggaagtggaaagctcattcctggatctggctctgtggcttgcccattactgggacttacctcttcccctcatctgttctttctgttttctcaaatgcctccaatttcatcatggaaatgctcagcttctatcagatagaacaaattctcccaagaggatggagtccagcctctatgtcgggttctaccttgcatttgatgtgcagactttgggcacacagagtcaactactgtttatgtttcaatgtgctgattgtcaagagtgaagagattctgagactttttttaacattaagtttgagttgtccttgaaaacaatgcccaatttgtcagatttctattctgtgccagttttcatccagtttaatgcgtgaactctatggattttacaaatgacgtcttctggatcatgttatctgtttacactgatcttaagtgtatgtaaaggttatttgactagatgtgtcttttgggttttttgtttctgtttttttttttttttttttttccagcagagaataaatggtcatctcaacatttgtttggtaaaagaagcaaattggtatgaaattgtatatttatgcatgttttttttccctttctgatatctctgcctcttcctctctctattattaaaggaagaaatacccctggaaagccaatgagagaggttagtgagattcaggctcacggccatggcttctgtctgtctcatcctgctttttatgtttggcgtttgtgtaagaattgtgtgtgtgcacgcgcatgtgtgtattacacattgtgtcatcatgtaaggatggtagtcacctctccacttgcagctcatgaggaacattcctcaaatgttcattgccgttgtcatcaccatgacgacaagactggggttgggagcaagaatctctttaaaatggcaatcctttgtagtccctaggttggaatcctgccgttcatcatctgttgccatttgcaacactaacaaaatcttcaaaataaatttagccttgaacataactgatgagtcataaagctttcttccacttccaggaccttagcattttctgccagcgcccttagtttttattcttctgggatgacttcattttgcttttgtttccttttttcttggttcctacgctctttctctcccattttagcgaacattttttgagcacttactgtgtgccaagcattgttctcagcacttgccatctttttcatcatgtcatcttcatgacaaacctgtgaggtaggtactcttattaaccccgttttacagataaggagactgagtcaatgagagagtaagcagtgtgtcccaggtgacagagccaaggatttggatccaggcagtctggctccagacccacactcttaactctcatttgaaaggcttacatcatctcaacgtacccttcagaagatgatcttttttatttggtatttgaagccacacagaacaataaccaattcgattaaaaaattaaatattggagttttgagaggtttttaaaatgcctatttatgggttgaaagggatagggtgcagtcttatcactgaatgtggtttcaggttttacggtgaaagatgcttcttactcctattccaccaggaatattgtctgaatatcgaattacctaattaagtgactgttggatgacaaagtgttaactgacagcccaagtaaaatcaaggttgtctttaccaagaatttaatctgaaggaggagagaaggaaagctctcccatgggatgacagtgttctgggagacaggctggatgggtggagagtccttcttaaatgagaagattctggattccttagcaacaggatggactggagagaccactgattcatttaaacacaggagtcgtaatgaaaactctgccaacatcatgccatacaagtctaatcaatttaatgattcttcagtgtgtctgtgccagtgcctccttccaaggctttgggcagtggggccagggagggaatggtaggctgggaggagaaattgaggaaacctgacttggtgaagcattgaatgcccctgacggtttgcctggttcatgtacttcgtatgtgagacttcttgggttcattcttatggtaagtgccccttaaaatttattcattttaactttttgtagaaaaatgcaccataattttgaccaccttaaacatgtttcactcacaaatgaatttcagaaaaggctagcacatgtaattgaagttatataggcatttgcagacttgactacctgaggtgtatggtgttcagacaagtttccagaagccaaagaatcaaaacaataatgaccttttttaatgctatgaaaatatcccaaatgtacgtaaagcagatttttttcagagattaaattatagagaagaaaagataagcaaatttccctgtagtattccggctttcctttggacaactgaatgctaacaatttatttgggaattgtatttttaaaaaatagagcaccagattgctattgaggtcttggatctttgccagaaagtctcaattccaatcgctgtggaaaacaattccctcaggcagtggtgacgtgtgagactaaatgtgttgcagttagcgccaacttgaaaaacatacaactgccctaatgttcaaggcatagtgcctttgtgttcaataatccttaagaatggattaaatcaatactttctatagacatagttttctgtcaccttgtgcctgaaggtgattgcaaatgcctgaatcctggctgcttttcagtacctctcatacttcatagtatgagattgtaattttgactttagaaaaatctgtcaggtaacattaatgacctcccgaatgctctgccttacacacatggataatagaactaggatacaaatctactttctatagtcatgtcacagtgcagtcttacccctccaacggattaaagtatgattctttagggcagtagtttgtaaaaagagattgacttcttttttctggatctaatgaaaaactccatggaaagaaattagaattatttattctggtaaagcaggtatttagtgaagtaaccaaaggcataatatagatgatgaggtgactctaaaagttctttatttttatagcacaaagatggccacaaggtcatttgtgaaaatgcagcagtgtaaaccggttaaaggccacccaactttttgtcggagtgtgcatggcacattaagaataatgaacctgttttccctggcaaatctttaaatagcagatacccctagaacttatgcttcttgagagactcaagaattttccttccagttagtaactgaacaccatttcaaggaagagaagcaccacttggctatataatccataaatgcatttatttgttttattatattttgaactgccatctacatcccctagcacacagcctaaaaagaaagacactttgtgattatcgataagctgacaggaaaaaaaatgagttttctccccttttcgttgatgttttgtaatatgttttctagctactaggtggactacatactatagtcacatgtgggccatgagaaatacttcgaattacattcaggcaccatgttgtaaaggtcctggactttgtttttactgattttgttaaccgtaaagatcgctagtaattaaaaattggcagttagtccatctatcttcaatttatgcatgaataattatgcagatttcccagggttgctggacagccaaaaatagatacaggggaagccctccaacttgatagcagcagttatatatttgtactctgagctctaaggagcagcaaaggccccactgtgtcgtcttcctgtggtttttatggcacagaaagccaaaaatgatttcagttcttcactgagggctgccaaactattggcccactttatgaatagttgcatatgctttgttaaaaaatttttatacttgcagtctcagccaaaatccaaagtgattttctaaaatataattaatactccatgaaattctttgcactaataaagcacaaaaagatagatatacaaacttggtcaccttaatagaaatgcctgaatgacattaaacttttaataagtaagtcttcagttgatctggtgccatcactgtttaagtgcctgcccgtgaatccgcttcattttgtagagaagctatatctcttgaaataaatattaaaacaaaatactctccctagtctatagctttaatttttattgggatatctttaatttttattggtatttttaacaattattatgggaatctgtaaagttgatacatggcaaggtagtaatagcctagtaaagcatttcagttccaaagacaatacttgaatagtggaaggatttaccaatgtgcaataattaaaattagccatgtaaaactatgggacatagacgaaaaggcaagccataaagtaagtctcagattatcttactctaaatctgaattttgctacgaagtacccagggacattgtgctgttctttttctccgtgctgggagattcgtgctaggtcgtgctgcattattagtaaaaggctattgtgatagttaaccctcatttaggaggagctctaagatggattcacaaaatacccaaatgcatacaatacatgtgggtcaccttataattagggtctagagtaatttggaatgtaaagcaatttttattctgaggtttcctaattcaaatgttaatagtgcaccaaaaggtcaattcaagagtttattattattatttttcaacccaagtaaaagcagagagaaaatagccacctccaccatagcctcagaagcaagccaacagcctgaaacagctttgaaatgaaaagttggtgtggcggtgatggtggcagtgataatggtgacgatggttgggtgctggtgatggtagtggtagttgtgaaggtggtgatggtggtttgattgatagtaaaaaaaatgttcgttaatacaagtagagagtaagtaatcaatcaatcactcatagccaaggtggaaaagatgtatcccatcatggaatattcctgttctgatagaaatcttgtgcttatctatggaattcttttgatatatatttacattgggaacctgaatgtagcttgacatttttccatgtaaacaccagtagcctgatccaacattaagctgatactaacaaacaacgtgtaatggcttcattaataaggctttgcttcttcctggaaactggtgaaaaatcaaaccttgttgtgtacaccctcgatgcagcttctgtgttgtcttcacccagaaatggggaatgatttcccaaatggcaaagaaacagagtgatgctatctatctgcaccttttgtaaagtctgtctttctttctctttgttttccaggacacaatgtaggaagtcttttccacatggcagatgatttgggcagagcgatggagtccttagtatcagtcatgacagatgaagaaggagcagaataaatgttttacaactcctgattcccgcatggtttttataatattcatacaacaaagaggattagacagtaagagtttacaagaaataaatctatatttttgtgaagggtagtggtattatactgtagatttcagtagtttctaagtctgttattgttttgttaacaatggcaggttttacacgtctatgcaattgtacaaaaaagttataagaaaactacatgtaaaatcttgatagctaaataacttgccatttctttatatggaacgcattttgggttgtttaaaaatttataacagttataaagaaagattgtaaactaaagtgtgctttataaaaaaaagttgtttataaaaacccctaaaaacaaaacaaacacacacacacacacatacacacacacacacaaaactttgaggcagcgcattgttttgcatccttttggcgtgatatccatatgaaattcatggctttttctttttttgcatattaaagataagacttcctctaccaccacaccaaatgactactacacactgctcatttgagaactgtcagctgagtggggcaggcttgagttttcatttcatatatctatatgtctataagtatataaatactatagttatatagataaagagatacgaatttctatagactgactttttccattttttaaatgttcatgtcacatcctaatagaaagaaattacttctagtcagtcatccaggcttacctgcttggtctagaatggatttttcccggagccggaagccaggaggaaactacaccacactaaaacattgtctacagctccagatgtttctcattttaaacaactttccactgacaacgaaagtaaagtaaagtattggatttttttaaagggaacatgtgaatgaatacacaggacttattatatcagagtgagtaatcggttggttggttgattgattgattgattgatacattcagcttcctgctgctagcaatgccacgatttagatttaatgatgcttcagtggaaatcaatcagaaggtattctgaccttgtgaacatcagaaggtattttttaactcccaagcagtagcaggacgatgatagggctggagggctatggattcccagcccatccctgtgaaggagtaggccactctttaagtgaaggattggatgattgttcataatacataaagttctctgtaattacaactaaattattatgccctcttctcacagtcaaaaggaactgggtggtttggtttttgttgcttttttagatttattgtcccatgtgggatgagtttttaaatgccacaagacataatttaaaataaataaactttgggaaaaggtgtaaaacagtagccccatcacatttgtgatactgacaggtatcaacccagaagcccatgaactgtgtttccatcctttgcatttctctgcgagtagttccacacaggtttgtaagtaagtaagaaagaaggcaaattgattcaaatgttacaaaaaaacccttcttggtggattagacaggttaaatatataaacaaacaaacaaaaattgctcaaaaaagaggagaaaagctcaagaggaaaagctaaggactggtaggaaaaagctttactctttcatgccattttatttctttttgatttttaaatcattcattcaatagataccaccgtgtgacctataattttgcaaatctgttacctctgacatcaagtgtaattagcttttggagagtgggctgacatcaagtgtaattagcttttggagagtgggttttgtccattattaataattaattaattaacatcaaacacggcttctcatgctatttctacctcactttggttttggggtgttcctgataattgtgcacacctgagttcacagcttcaccacttgtccattgcgttattttctttttcctttataattctttctttttccttcataattttcaaaagaaaacccaaagctctaaggtaacaaattaccaaattacatgaagatttggtttttgtcttgcatttttttcctttatgtgacgctggaccttttctttacccaaggatttttaaaactcagatttaaaacaaggggttactttacatcctactaagaagtttaagtaagtaagtttcattctaaaatcagaggtaaatagagtgcataaataattttgttttaatctttttgtttttcttttagacacattagctctggagtgagtctgtcataatatttgaacaaaaattgagagctttattgctgcattttaagcataattaatttggacattatttcgtgttgtgttctttataaccaccaagtattaaactgtaaatcataatgtaactgaagcataaacatcacatggcatgttttgtcattgttttcaggtactgagttcttacttgagtatcataatatattgtgttttaacaccaacactgtaacatttacgaattatttttttaaacttcagttttactgcattttcacaacatatcagacttcaccaaatatatgccttactattgtattatagtactgctttactgtgtatctcaataaagcacgcagttatgttacaaaaaagtattgactggactgcagtactttgtttttattttaatttagttgttgttacttacttacttactttttaaataggtaatacatgcatatgagtaaaaaactataatccagaaagacagtgaaaacactcctaactaccccttcccccatatcaatcaatcatcctcattgctctatgagtagacattattaatttcttatttagtcttccagagggtctttctttattaattattatataagcagttaaaataatatatatgttcctatttatttttttcctattattatttcataggatatagcattctctgcacccagttatgcaccttacttgtttgtttgtttaaatttaaatatggactcaagaaatcttttcatttaaatatataaaatgctttctcattcttttttatagctgtataatatttcattatatgttcataggatattttatttaagcagttccctttggtgggatatgtagtctgttgtcagtctttcttttgctataacaaacaatattgcacatttctcattacatcatttcatttgtgcataaacaaacaaatctgtgggatacttcctagaagtgagattgctggatcaaagggggtaagcatttgtagactgggagatgatacattttgtgcagtgattgattgattgatagtcatagtgtttgtttgtttgttgtgttttttgttttaataatgacaagtatattaattaagtcagtttgcagttcatactttgcttctcaagagaatttcatatcacttctattcttaatgtcaccatctaagaggatgcatgagtgagtagtaagaaagagacacctaaaatgatgtctcacaactggttctggggaagaagaatcccttaccatagtcaaccaccaccatggggagaacctctcctttgcccctgccctgctctgtttcttgccctagctgcaaaggaagctgagaaagtgggtagcaatgtcagcacttcttagggagaggctatctatctttacctattcccaaggttcatggatggggtgggcggggttccccaacagtgttcagatactggtgagccaaaggaataacataagtccaccaggtgcagcctatcctagtgattttggaaataataggagatgagatgatccatctcattagaaatgatgtttgttagtagatgtggcatctctgctgtgaatcaatcacttgctaattttttgaaagtagggtgatgatgctgacctaagtgactaccacattgaaacacttcccttgacatccacacataccaagaaaaattttcatcctatttaaataaacaaatcatttatccttcccaccattacccgaacctacctttgtttgaaacacccagactggctgttttggtgacacttaaggaggtaactgaggaatcttcaatacttcaccacgtctaagacaactgtgtgtggatgactctgaggagggcatttggttttccattccatacttggcacacactagaagagacagaattaattcagttaaaaattaaaatgaatcgagctggcacagattatgcaccggcaagcaaaatgtgtgtttgtttgggagaaagcaccaagactaatggatgtgttctgtagagctgcgatgggatttccctgaatttgtaatgctctaatggtggaatgaatacaaaggcaggcactggcgcacttgcaaagactttgccttcaaattaagtgtaggaaggacacaaatcaaattctttcccacagtagcaaagccattggagtaggaactataaatatgttcttcaatgccccttgcacgtcagtgtactgtgatctcatggacttagctgacaacacaagagtggcagcatgcccaacattccataataaacaatattgtgtgaatgtgtaaagtttggggatgtttgtttgagagtagcttttgtgtacagaaaaggttacctacagtaacttgaggtttaaatgttatatgtacatatgtgtgtatgtacatgtgtgtattttatatacattcaggattttagctcttccataactttattttgaaataattcaaacaagaaaaactgaaacaaaagaaaaattgcaagaacagtacaaagaaagaacccacatataccctttacccaggttaatgaattgtttacattttgcttcatttactttatcgttctctcaatgaatagatgatagtttttcctgaaccattttaagaataagttgtagacatcatgcctccttacatttaaatacatcatgtacatttcctaatatctaggacagtctcttgtataaccatagtacaattatcaaaataaaaaaattatatatagctatcatctactccacagtccatattcaaccaaatattgtcaattgtgccaatgatgtctttcatcattatatatatttccctagtctggactctaattcatgatttcatgacatttagttgtcatatctctttaatcacctttgatccggaacagtgtctctgcctttctctgtcttcaaagaccttcacatttttaagagtacaagacagttactttgtaggatgtgcatcaatttgggtttgtctgatgtgttctcatggtttagattcagggtatgcatttttgtcaggaatactacacaaacaatgatgtgtcctcagcatgtgataccaggaggcatattcccattcttggtgctgttaacactgatcatttggtaaaggtggtgtctgccaggtttctccacttggtatacattttaaaacctaagttttcataaatctttaggttcaacttagaaatttcatttttagatatataaatgtagacaatttgtatgaagtaagaacagtcacttttagtgagcagacttagccacgttgagtagtctgaattttttcgttctaagctgtatttatacacttaatgtgctttattttcaagcctatctaatatctcacagggaagaccaacgccaaccaacagcacctccaccatacctaactcacatatatcgagacaaacatataaatatagtgaatctcaagtcctctgaaacattccaatagcatatactgtatgagctgagtccaactttttttattcattttgaaataataacatgtgtaaaattacacattttacattggaacctaagacatctctccaatttgctaatatgtcaaattgccaca

SEQ ID NO: 76 - DNA, 13764 bp, Homo sapiens
tcactgacacatagagtaacttctagttctccaagctctactcatgatgaaagagaagatgttcaaaagaaaacattcacaaaatgggtaaatgcacaattttctaagtttgggaagcagcatattgagaacctcttcagtgacctacaggatgggaggcgcctcctagacctcctcgaaggcctgacagggcaaaaactgccaaaagaaaaaggatccacaagagttcatgccctgaacaatgtcaacaaggcactgcgggttttgcagaacaataatgttgatttagtgaatattggaagtactgacatcgtagatggaaatcataaactgactcttggtttgatttggaatataatcctccactggcaggtcaaaaatgtaatgaaaaatatcatggctggattgcaacaaaccaacagtgaaaagattctcctgagctgggtccgacaatcaactcgtaattatccacaggttaatgtaatcaacttcaccaccagctggtctgatggcctggctttgaatgctctcatccatagtcataggccagacctatttgactggaatagtgtggtttgccagcagtcagccacacaacgactggaacatgcattcaacatcgccagatatcaattaggcatagagaaactactcgatcctgaagatgttgataccacctatccagataagaagtccatcttaatgtacatcacatcactcttccaagttttgcctcaacaagtgagcattgaagccatccaggaagtggaaatgttgccaaggccacctaaagtgactaaagaagaacattttcagttacatcatcaaatgcactattctcaacagatcacggtcagtctagcacagggatatgagagaacttcttcccctaagcctcgattcaagagctatgcctacacacaggctgcttatgtcaccacctctgaccctacacggagcccatttccttcacagcatttggaagctcctgaagacaagtcatttggcagttcattgatggagagtgaagtaaacctggaccgttatcaaacagctttagaagaagtattatcgtggcttctttctgctgaggacacattgcaagcacaaggagagatttctaatgatgtggaagtggtgaaagaccagtttcatactcatgaggggtacatgatggatttgacagcccatcagggccgggttggtaatattctacaattgggaagtaagctgattggaacaggaaaattatcagaagatgaagaaactgaagtacaagagcagatgaatctcctaaattcaagatgggaatgcctcagggtagctagcatggaaaaacaaagcaatttacatagagttttaatggatctccagaatcagaaactgaaagagttgaatgactggctaacaaaaacagaagaaagaacaaggaaaatggaggaagagcctcttggacctgatcttgaagacctaaaacgccaagtacaacaacataaggtgcttcaagaagatctagaacaagaacaagtcagggtcaattctctcactcacatggtggtggtagttgatgaatctagtggagatcacgcaactgctgctttggaagaacaacttaaggtattgggagatcgatgggcaaacatctgtagatggacagaagaccgctgggttcttttacaagacatccttctcaaatggcaacgtcttactgaagaacagtgcctttttagtgcatggctttcagaaaaagaagatgcagtgaacaagattcacacaactggctttaaagatcaaaatgaaatgttatcaagtcttcaaaaactggccgttttaaaagcggatctagaaaagaaaaagcaatccatgggcaaactgtattcactcaaacaagatcttctttcaacactgaagaataagtcagtgacccagaagacggaagcatggctggataactttgcccggtgttgggataatttagtccaaaaacttgaaaagagtacagcacagatttcacaggctgtcaccaccactcagccatcactaacacagacaactgtaatggaaacagtaactacggtgaccacaagggaacagatcctggtaaagcatgctcaagaggaacttccaccaccacctccccaaaagaagaggcagattactgtggattctgaaattaggaaaaggttggatgttgatataactgaacttcacagctggattactcgctcagaagctgtgttgcagagtcctgaatttgcaatctttcggaaggaaggcaacttctcagacttaaaagaaaaagtcaatgccatagagcgagaaaaagctgagaagttcagaaaactgcaagatgccagcagatcagctcaggccctggtggaacagatggtgaatgagggtgttaatgcagatagcatcaaacaagcctcagaacaactgaacagccggtggatcgaattctgccagttgctaagtgagagacttaactggctggagtatcagaacaacatcatcgctttctataatcagctacaacaattggagcagatgacaactactgctgaaaactggttgaaaatccaacccaccaccccatcagagccaacagcaattaaaagtcagttaaaaatttgtaaggatgaagtcaaccggctatcaggtcttcaacctcaaattgaacgattaaaaattcaaagcatagccctgaaagagaaaggacaaggacccatgttcctggatgcagactttgtggcctttacaaatcattttaagcaagtcttttctgatgtgcaggccagagagaaagagctacagacaatttttgacactttgccaccaatgcgctatcaggagaccatgagtgccatcaggacatgggtccagcagtcagaaaccaaactctccatacctcaacttagtgtcaccgactatgaaatcatggagcagagactcggggaattgcaggctttacaaagttctctgcaagagcaacaaagtggcctatactatctcagcaccactgtgaaagagatgtcgaagaaagcgccctctgaaattagccggaaatatcaatcagaatttgaagaaattgagggacgctggaagaagctctcctcccagctggttgagcattgtcaaaagctagaggagcaaatgaataaactccgaaaaattcagaatcacatacaaaccctgaagaaatggatggctgaagttgatgtttttctgaaggaggaatggcctgcccttggggattcagaaattctaaaaaagcagctgaaacagtgcagacttttagtcagtgatattcagacaattcagcccagtctaaacagtgtcaatgaaggtgggcagaagataaagaatgaagcagagccagagtttgcttcgagacttgagacagaactcaaagaacttaacactcagtgggatcacatgtgccaacaggtctatgccagaaaggaggccttgaagggaggtttggagaaaactgtaagcctccagaaagatctatcagagatgcacgaatggatgacacaagctgaagaagagtatcttgagagagattttgaatataaaactccagatgaattacagaaagcagttgaagagatgaagagagctaaagaagaggcccaacaaaaagaagcgaaagtgaaactccttactgagtctgtaaatagtgtcatagctcaagctccacctgtagcacaagaggccttaaaaaaggaacttgaaactctaaccaccaactaccagtggctctgcactaggctgaatgggaaatgcaagactttggaagaagtttgggcatgttggcatgagttattgtcatacttggagaaagcaaacaagtggctaaatgaagtagaatttaaacttaaaaccactgaaaacattcctggcggagctgaggaaatctctgaggtgctagattcacttgaaaatttgatgcgacattcagaggataacccaaatcagattcgcatattggcacagaccctaacagatggcggagtcatggatgagctaatcaatgaggaacttgagacatttaattctcgttggagggaactacatgaagaggctgtaaggaggcaaaagttgcttgaacagagcatccagtctgcccaggagactgaaaaatccttacacttaatccaggagtccctcacattcattgacaagcagttggcagcttatattgcagacaaggtggacgcagctcaaatgcctcaggaagcccagaaaatccaatctgatttgacaagtcatgagatcagtttagaagaaatgaagaaacataatcaggggaaggaggctgcccaaagagtcctgtctcagattgatgttgcacagaaaaaattacaagatgtctccatgaagtttcgattattccagaaaccagccaattttgagcagcgtctacaagaaagtaagatgattttagatgaagtgaagatgcacttgcctgcattggaaacaaagagtgtggaacaggaagtagtacagtcacagctaaatcattgtgtgaacttgtataaaagtctgagtgaagtgaagtctgaagtggaaatggtgataaagactggacgtcagattgtacagaaaaagcagacggaaaatcccaaagaacttgatgaaagagtaacagctttgaaattgcattataatgagctgggagcaaaggtaacagaaagaaagcaacagttggagaaatgcttgaaattgtcccgtaagatgcgaaaggaaatgaatgtcttgacagaatggctggcagctacagatatggaattgacaaagagatcagcagttgaaggaatgcctagtaatttggattctgaagttgcctggggaaaggctactcaaaaagagattgagaaacagaaggtgcacctgaagagtatcacagaggtaggagaggccttgaaaacagttttgggcaagaaggagacgttggtggaagataaactcagtcttctgaatagtaactggatagctgtcacctcccgagcagaagagtggttaaatcttttgttggaataccagaaacacatggaaacttttgaccagaatgtggaccacatcacaaagtggatcattcaggctgacacacttttggatgaatcagagaaaaagaaaccccagcaaaaagaagacgtgcttaagcgtttaaaggcagaactgaatgacatacgcccaaaggtggactctacacgtgaccaagcagcaaacttgatggcaaaccgcggtgaccactgcaggaaattagtagagccccaaatctcagagctcaaccatcgatttgcagccatttcacacagaattaagactggaaaggcctccattcctttgaaggaattggagcagtttaactcagatatacaaaaattgcttgaaccactggaggctgaaattcagcagggggtgaatctgaaagaggaagacttcaataaagatatgaatgaagacaatgagggtactgtaaaagaattgttgcaaagaggagacaacttacaacaaagaatcacagatgagagaaagcgagaggaaataaagataaaacagcagctgttacagacaaaacataatgctctcaaggatttgaggtctcaaagaagaaaaaaggctctagaaatttctcatcagtggtatcagtacaagaggcaggctgatgatctcctgaaatgcttggatgacattgaaaaaaaattagccagcctacctgagcccagagatgaaaggaaaataaaggaaattgatcgggaattgcagaagaagaaagaggagctgaatgcagtgcgtaggcaagctgagggcttgtctgaggatggggccgcaatggcagtggagccaactcagatccagctcagcaagcgctggcgggaaattgagagcaaatttgctcagtttcgaagactcaactttgcacaaattcacactgtccgtgaagaaacgatgatggtgatgactgaagacatgcctttggaaatttcttatgtgccttctacttatttgactgaaatcactcatgtctcacaagccctattagaagtggaacaacttctcaatgctcctgacctctgtgctaaggactttgaagatctctttaagcaagaggagtctctgaagaatataaaagatagtctacaacaaagctcaggtcggattgacattattcatagcaagaagacagcagcattgcaaagtgcaacgcctgtggaaagggtgaagctacaggaagctctctcccagcttgatttccaatgggaaaaagttaacaaaatgtacaaggaccgacaagggcgatttgacagatctgttgagaaatggcggcgttttcattatgatataaagatatttaatcagtggctaacagaagctgaacagtttctcagaaagacacaaattcctgagaattgggaacatgctaaatacaaatggtatcttaaggaactccaggatggcattgggcagcggcaaactgttgtcagaacattgaatgcaactggggaagaaataattcagcaatcctcaaaaacagatgccagtattctacaggaaaaattgggaagcctgaatctgcggtggcaggaggtctgcaaacagctgtcagacagaaaaaagaggctagaagaacaaaagaatatcttgtcagaatttcaaagagatttaaatgaatttgttttatggttggaggaagcagataacattgctagtatcccacttgaacctggaaaagagcagcaactaaaagaaaagcttgagcaagtcaagttactggtggaagagttgcccctgcgccagggaattctcaaacaattaaatgaaactggaggacccgtgcttgtaagtgctcccataagcccagaagagcaagataaacttgaaaataagctcaagcagacaaatctccagtggataaaggtttccagagctttacctgagaaacaaggagaaattgaagctcaaataaaagaccttgggcagcttgaaaaaaagcttgaagaccttgaagagcagttaaatcatctgctgctgtggttatctcctattaggaatcagttggaaatttataaccaaccaaaccaagaaggaccatttgacgttcaggaaactgaaatagcagttcaagctaaacaaccggatgtggaagagattttgtctaaagggcagcatttgtacaaggaaaaaccagccactcagccagtgaagaggaagttagaagatctgagctctgagtggaaggcggtaaaccgtttacttcaagagctgagggcaaagcagcctgacctagctcctggactgaccactattggagcctctcctactcagactgttactctggtgacacaacctgtggttactaaggaaactgccatctccaaactagaaatgccatcttccttgatgttggaggtacctgctctggcagatttcaaccgggcttggacagaacttaccgactggctttctctgcttgatcaagttataaaatcacagagggtgatggtgggtgaccttgaggatatcaacgagatgatcatcaagcagaaggcaacaatgcaggatttggaacagaggcgtccccagttggaagaactcattaccgctgcccaaaatttgaaaaacaagaccagcaatcaagaggctagaacaatcattacggatcgaattgaaagaattcagaatcagtgggatgaagtacaagaacaccttcagaaccggaggcaacagttgaatgaaatgttaaaggattcaacacaatggctggaagctaaggaagaagctgagcaggtcttaggacaggccagagccaagcttgagtcatggaaggagggtccctatacagtagatgcaatccaaaagaaaatcacagaaaccaagcagttggccaaagacctccgccagtggcagacaaatgtagatgtggcaaatgacttggccctgaaacttctccgggattattctgcagatgataccagaaaagtccacatgataacagagaatatcaatgcctcttggagaagcattcataaaagggtgagtgagcgagaggctgctttggaagaaactcatagattactgcaacagttccccctggacctggaaaagtttcttgcctggcttacagaagctgaaacaactgccaatgtcctacaggatgctacccgtaaggaaaggctcctagaagactccaagggagtaaaagagctgatgaaacaatggcaagacctccaaggtgaaattgaagctcacacagatgtttatcacaacctggatgaaaacagccaaaaaatcctgagatccctggaaggttccgatgatgcagtcctgttacaaagacgtttggataacatgaacttcaagtggagtgaacttcggaaaaagtctctcaacattaggtcccatttggaagccagttctgaccagtggaagcgtctgcacctttctctgcaggaacttctggtgtggctacagctgaaagatgatgaattaagccggcaggcacctattggaggcgactttccagcagttcagaagcagaacgatgtacatagggccttcaagagggaattgaaaactaaagaacctgtaatcatgagtactcttgagactgtacgaatatttctgacagagcagcctttggaaggactagagaaactctaccaggagcccagagagctgcctcctgaggagagagcccagaatgtcactcggcttctacgaaagcaggctgaggaggtcaatactgagtgggaaaaattgaacctgcactccgctgactggcagagaaaaatagatgagacccttgaaagactccaggaacttcaagaggccacggatgagctggacctcaagctgcgccaagctgaggtgatcaagggatcctggcagcccgtgggcgatctcctcattgactctctccaagatcacctcgagaaagtcaaggcacttcgaggagaaattgcgcctctgaaagagaacgtgagccacgtcaatgaccttgctcgccagcttaccactttgggcattcagctctcaccgtataacctcagcactctggaagacctgaacaccagatggaagcttctgcaggtggccgtcgaggaccgagtcaggcagctgcatgaagcccacagggactttggtccagcatctcagcactttctttccacgtctgtccagggtccctgggagagagccatctcgccaaacaaagtgccctactatatcaaccacgagactcaaacaacttgctgggaccatcccaaaatgacagagctctaccagtctttagctgacctgaataatgtcagattctcagcttataggactgccatgaaactccgaagactgcagaaggccctttgcttggatctcttgagcctgtcagctgcatgtgatgccttggaccagcacaacctcaagcaaaatgaccagcccatggatatcctgcagattattaattgtttgaccactatttatgaccgcctggagcaagagcacaacaatttggtcaacgtccctctctgcgtggatatgtgtctgaactggctgctgaatgtttatgatacgggacgaacagggaggatccgtgtcctgtcttttaaaactggcatcatttccctgtgtaaagcacatttggaagacaagtacagataccttttcaagcaagtggcaagttcaacaggattttgtgaccagcgcaggctgggcctccttctgcatgattctatccaaattccaagacagttgggtgaagttgcatcctttgggggcagtaacattgagccaagtgtccggagctgcttccaatttgctaataataagccagagatcgaagcggccctcttcctagactggatgagactggaaccccagtccatggtgtggctgcccgtcctgcacagagtggctgctgcagaaactgccaagcatcaggccaaatgtaacatctgcaaagagtgtccaatcattggattcaggtacaggagtctaaagcactttaattatgacatctgccaaagctgctttttttctggtcgagttgcaaaaggccataaaatgcactatcccatggtggaatattgcactccgactacatcaggagaagatgttcgagactttgccaaggtactaaaaaacaaatttcgaaccaaaaggtattttgcgaagcatccccgaatgggctacctgccagtgcagactgtcttagagggggacaacatggaaactcccgttactctgatcaacttctggccagtagattctgcgcctgcctcgtcccctcagctttcacacgatgatactcattcacgcattgaacattatgctagcaggctagcagaaatggaaaacagcaatggatcttatctaaatgatagcatctctcctaatgagagcatagatgatgaacatttgttaatccagcattactgccaaagtttgaaccaggactcccccctgagccagcctcgtagtcctgcccagatcttgatttccttagagagtgaggaaagaggggagctagagagaatcctagcagatcttgaggaagaaaacaggaatctgcaagcagaatatgaccgtctaaagcagcagcacgaacataaaggcctgtccccactgccgtcccctcctgaaatgatgcccacctctccccagagtccccgggatgctgagctcattgctgaggccaagctactgcgtcaacacaaaggccgcctggaagccaggatgcaaatcctggaagaccacaataaacagctggagtcacagttacacaggctaaggcagctgctggagcaaccccaggcagaggccaaagtgaatggcacaacggtgtcctctccttctacctctctacagaggtccgacagcagtcagcctatgctgctccgagtggttggcagtcaaacttcggactccatgggtgaggaagatcttctcagtcctccccaggacacaagcacagggttagaggaggtgatggagcaactcaacaactccttccctagttcaagaggaagaaatacccctggaaagccaatgagagaggacacaatgtaggaagtcttttccacatggcagatgatttgggcagagcgatggagtccttagtatcagtcatgacagatgaagaaggagcagaataaatgttttacaactcctgattcccgcatggtttttataatattcatacaacaaagaggattagacagtaagagtttacaagaaataaatctatatttttgtgaagggtagtggtattatactgtagatttcagtagtttctaagtctgttattgttttgttaacaatggcaggttttacacgtctatgcaattgtacaaaaaagttataagaaaactacatgtaaaatcttgatagctaaataacttgccatttctttatatggaacgcattttgggttgtttaaaaatttataacagttataaagaaagattgtaaactaaagtgtgctttataaaaaaaagttgtttataaaaacccctaaaaacaaaacaaacacacacacacacacatacacacacacacacaaaactttgaggcagcgcattgttttgcatccttttggcgtgatatccatatgaaattcatggctttttctttttttgcatattaaagataagacttcctctaccaccacaccaaatgactactacacactgctcatttgagaactgtcagctgagtggggcaggcttgagttttcatttcatatatctatatgtctataagtatataaatactatagttatatagataaagagatacgaatttctatagactgactttttccattttttaaatgttcatgtcacatcctaatagaaagaaattacttctagtcagtcatccaggcttacctgcttggtctagaatggatttttcccggagccggaagccaggaggaaactacaccacactaaaacattgtctacagctccagatgtttctcattttaaacaactttccactgacaacgaaagtaaagtaaagtattggatttttttaaagggaacatgtgaatgaatacacaggacttattatatcagagtgagtaatcggttggttggttgattgattgattgattgatacattcagcttcctgctgctagcaatgccacgatttagatttaatgatgcttcagtggaaatcaatcagaaggtattctgaccttgtgaacatcagaaggtattttttaactcccaagcagtagcaggacgatgatagggctggagggctatggattcccagcccatccctgtgaaggagtaggccactctttaagtgaaggattggatgattgttcataatacataaagttctctgtaattacaactaaattattatgccctcttctcacagtcaaaaggaactgggtggtttggtttttgttgcttttttagatttattgtcccatgtgggatgagtttttaaatgccacaagacataatttaaaataaataaactttgggaaaaggtgtaagacagtagccccatcacatttgtgatactgacaggtatcaacccagaagcccatgaactgtgtttccatcctttgcatttctctgcgagtagttccacacaggtttgtaagtaagtaagaaagaaggcaaattgattcaaatgttacaaaaaaacccttcttggtggattagacaggttaaatatataaacaaacaaacaaaaattgctcaaaaaagaggagaaaagctcaagaggaaaagctaaggactggtaggaaaaagctttactctttcatgccattttatttctttttgatttttaaatcattcattcaatagataccaccgtgtgacctataattttgcaaatctgttacctctgacatcaagtgtaattagcttttggagagtgggctgacatcaagtgtaattagcttttggagagtgggttttgtccattattaataattaattaattaacatcaaacacggcttctcatgctatttctacctcactttggttttggggtgttcctgataattgtgcacacctgagttcacagcttcaccacttgtccattgcgttattttctttttcctttataattctttctttttccttcataattttcaaaagaaaacccaaagctctaaggtaacaaattaccaaattacatgaagatttggtttttgtcttgcatttttttcctttatgtgacgctggaccttttctttacccaaggatttttaaaactcagatttaaaacaaggggttactttacatcctactaagaagtttaagtaagtaagtttcattctaaaatcagaggtaaatagagtgcataaataattttgttttaatctttttgtttttcttttagacacattagctctggagtgagtctgtcataatatttgaacaaaaattgagagctttattgctgcattttaagcataattaatttggacattatttcgtgttgtgttctttataaccaccgagtattaaactgtaaatcataatgtaactgaagcataaacatcacatggcatgttttgtcattgttttcaggtactgagttcttacttgagtatcataatatattgtgttttaacaccaacactgtaacatttacgaattatttttttaaacttcagttttactgcattttcacaacatatcagacttcaccaaatatatgccttactattgtattatagtactgctttactgtgtatctcaataaagcacgcagttatgttac

SEQ ID NO: 77 - DNA, 6923 bp, Homo sapiens
gagaggggcagggggcggagctggagggggtggttcggcgtgggggccgttggctccagacaaataaacatggagtccatcttccacgagaaacaagaaggctcactttgtgctcaacattgcctgaataacttattgcaaggagaatattttagccctgtggaattatcctcaattgcacatcagctggatgaggaggagaggatgagaatggcagaaggaggagttactagtgaagattatcgcacgtttttacagcagccttctggaaatatggatgacagtggttttttctctattcaggttataagcaatgccttgaaagtttggggtttagaactaatcctgttcaacagtccagagtatcagaggctcaggatcgatcctataaatgaaagatcatttatatgcaattataaggaacactggtttacagttagaaaattaggaaaacagtggtttaacttgaattctctcttgacgggtccagaattaatatcagatacatatcttgcacttttcttggctcaattacaacaggaaggttattctatatttgtcgttaagggtgatctgccagattgcgaagctgaccaactcctgcagatgattagggtccaacagatgcatcgaccaaaacttattggagaagaattagcacaactaaaagagcaaagagtccataaaacagacctggaacgagtgttagaagcaaatgatggctcaggaatgttagacgaagatgaggaggatttgcagagggctctggcactaagtcgccaagaaattgacatggaagatgaggaagcagatctccgcagggctattcagctaagtatgcaaggtagttccagaaacatatctcaagatatgacacagacatcaggtacaaatcttacttcagaagagcttcggaagagacgagaagcctactttgaaaaacagcagcaaaagcagcaacagcagcagcagcagcagcagcagggggacctatcaggacagagttcacatccatgtgaaaggccagccaccagttcaggagcacttgggagtgatctaggtgatgctatgagtgaagaagacatgcttcaggcagctgtgaccatgtctttagaaactgtcagaaatgatttgaaaacagaaggaaaaaaataatacctttaaaaaataatttagatattcatactttccaacattatcctgtgtgattacagcatagggtccactttggtaatgtgtcaaagagatgaggaaataagacttttagcggtttgcaaacaaaatgatgggaaagtggaacaatgcgtcggttgtaggactaaataatgatcttccaaatattagccaaagaggcattcagcaattaaagacatttaaaatagttttctaaatgtttctttttcttttttgagtgtgcaatatgtaacatgtctaaagttagggcatttttcttggatctttttgcagactagctaattagctctcgcctcaggctttttccatatagtttgttttctttttctgtcttgtaggtaagttggctcacatcatgtaatagtggctttcatttcttattaaccaaattaacctttcaggaaagtatctctactttcctgatgttgataatagtaatggttctagaaggatgaacagttctcccttcaactgtataccgtgtgctccagtgttttcttgtgttgttttctctgatcacaacttttctgctacctggttttcattattttcccacaattcttttgaaagatggtaatcttttctgaggtttagcgttttaagccctacgatgggatcattatttcatgactggtgcgttcctaaactctgaaatcagccttgcacaagtacttgagaataaatgagcattttttaaaatgtgtgagcatgtgctttcccagatgctttatgaatgtcttttcacttatatcaaaaccttacagctttgttgcaaccccttcttcctgcgccttattttttcctttcttctccaattgagaaaactaggagaagcatagtatgcaggcaagtctccttctgttagaagactaaacatacgtacccaccatgaatgtatgatacatgaaatttggccttcaattttaatagcagttttattttattttttctcctatgactggagctttgtgttctctttacagttgagtcatggaatgtaggtgtctgcttcacatcttttagtaggtatagcttgtcaaagatggtgatctggaacatgaaaataatttactaatgaaaatatgtttaaatttatactgtgatttgacacttgcatcatgtttagatagcttaagaacaatggaagtcacagtacttagtggatctataaataagaaagtccatagttttgataaatattctctttaattgagatgtacagagagtttcttgctgggtcaataggatagtatcattttggtgaaaaccatgtctctgaaattgatgttttagtttcagtgttccctatccctcattctccatctccttttgaagctcttttgaatgttgaattgttcataagctaaaatccaagaaatttcagctgacaacttcgaaaattataatatggtatattgccctcctggtgtgtggctgcacacattttatcagggaaagttttttgatctaggatttattgctaactaactgaaaagagaagaaaaaatatcttttatttatgattataaaatagctttttcttcgatataacagattttttaagtcattattttgtgccaatcagttttctgaagtttcccttacacaaaaggatagctttattttaaaatctaaagtttcttttaatagttaaaaatgtttcagaagaattataaaactttaaaactgcaagggatgttggagtttagtactactccctcaagatttaaaaagctaaatattttaagactgaacatttatgttaattattaccagtgtgtttgtcatattttccatggatatttgttcattacctttttccattgaaaagttacattaaacttttcatacacttgaattgatgagctacctaatataaaaatgagaaaaccaatatgcattttaaagttttaactttagagtttataaagttcatatataccctagttaaagcacttaagaaaatatggcatgtttgacttttagttcctagagagtttttgtttttgtttttgtttttttttgagacggagtcttgctatgtctcccaggctggagggcagtggcatgatctcggctcactacaacttccacctcccgggttcaagcaattctcctgcctcagcctccagagtagctgggattacaggcgcccaccaccacacccggcagatttttgtatttttggtagagacgcggtttcatcatgtttggccaggctggtctcgaactcctgacctcaggtgatccgcctgccttggcctcccaaagtgttgggattacaggcatgagccactgcgcctggccagctagagagtttttaaagcagagctgagcacacactggatgcgtttgaatgtgtttgtgtagtttgttgtgaaattgttacatttagcaggcagatccagaagcactagtgaactgtcatcttggtggggttggcttaaatttaattgactgtttagattccatttcttaattgattggccagtatgaaaagatgccagtgcaagtaaccatagtatcaaaaaagttaaaaattattcaaagctatagtttatacatcaggtactgccatttactgtaaaccacctgcaagaaagtcaggaacaactaaattcacaagaactgtcctgctaagaagtgtattaaagatttccattttgttttactaattgggaacatcttaatgtttaatatttaaactattggtatcatttttctaatgtataatttgtattactgggatcaagtatgtacagtggtgatgctagtagaagtttaagccttggaaataccactttcatattttcagatgtcatggatttaatgagtaatttatgtttttaaaattcagaatagttaatctctgatctaaaaccatcaatctatgttttttacggtaatcatgtaaatatttcagtaatataaactgtttgaaaaggctgctgcaggtaaactctatactaggatcttggccaaataatttacaattcacagaatattttatttaaggtggtgctttttttttttgtccttaaaacttgatttttcttaactttattcatgatgccaaagtaaatgaggaaaaaaactcaaaaccagttgagtatcattgcagacaaaactaccagtagtccatattgtttaatattaagttgaataaaataaattttatttcagtcagagcctaaatcacattttgattgtctgaatttttgatactatttttaaaatcatgctagtggcggctgggcgtggtagctcacgcctgtaatcccagcattttgggaggccgaagtgggtggatcacgaggtcgggagttcgagaccagcttggccaaaatggtgaaaccccatctgtactaaaaactacaaaaattagctgggcgcggtggcaggtgcctgtaatcccagctacctgggagtctgaggcaggagaattgcttgaaccctggcgacagaggatgcagtgagccaagatggtgccactgtactccagactgggcgacagagtgagactctgtctcaaaaaaaaaaaaaaaatcatgctagtgccaagagctactaaattcttaaaaccggcccattggacctgtacagataaaaaatagattcagtgcataatcaaaatatgataattttaaaatcttaagtagaaaaataaatcttgatgttttaaattcttacgaggattcaatagttaatattgatgatctcccggctgggtgcagtggctcacgcctgtaatcccagcagttctggaggctgaggtgggcgaatcacttcaggccaggagttcaagaccagtctgggcaacatggtgaaacctcgtttctactaaaaatacaaaaattagccgggcgtggttgcacacacttgtaatcccagctactcaggaggctaagaatcgcatgagcctaggaggcagaggttgcagagtgccaagggctcaccactgcattccagcctgcccaacagagtgagacactgtttctgaaaaaaaaaaatatatatatatatatatatatgtgtgtatatatatatgtatatatatatgacttcctattaaaaactttatcccagtcgggggcagtggctcacgcctgtaatcccaacactttgggaggctgaggcaggtggatcacctgaagtccggagtttgagaccagcctggccaacatggtgaaaccccatctctactaaaaatacaaaacttaagccaggtatggtggcgggcacctgtaatcccagttacttgggaggctgaggcaggagaatcgtttaaacccaggaggtggaggttgcagtgagctgagatcgtgccattgcactctagcctgggcaacaagagtaaaactccatcttaaaggtttgtttgtttttttttaatccggaaacgaagaggcgttgggccgctattttctttttctttctttctttctttctttttttttttttctgagacggagtctagctctgctgcccaggctggagtacaatgacacgatgttggctcactgcaacctccacctcctgggttcaagcgattctcctgcctcagcctcccaagtacctgggattacaggcacctgccactacacctggcgaatatttgttttttttagtagagacgggcttttaccatgttaggctggtctcaaactcctgacctcaggtgatctgcctgccttggcctcccaaagtgctgggattacaggtgcaggccaccacacccggccttgggccactgttttcaaagtgaattgtttgttgtatcgagtccttaagtatggatatatatgtgaccctaattaagaactaccagattggatcaactaatcatgtcagcaatgtaaataactttatttttcatattcaaaataaaaactttcttttatttctggcccctttataaccagcatctttttgctttaaaaaatgacctggctttgtatttttttagtcttaaacataataaaaatatttttgttctaatttgctttcatgagtgaagattattgacatcgttggtaaattctagaattttgattttgttttttaatttgaagaaaatctttgctattattattttttccaagtggtctggcattttaagaattagtgctaataacgtaacttctaaatttgtcgtaattggcatgtttaatagcatatcaaaaaacattttaagcctgtggattcatagacaaagcaatgagaaacattagtaaaatataaatggatattcctgatgcatttaggaagctctcaattgtctcttgcatagttcaaggaatgttttctgaatttttttaatgctttttttttttttgaaagaggaaaacatacatttttaaatgtgattatctaatttttacaacactgggctattaggaataactttttaaaaattactgttctgtataaatatttgaaattcaagtacagaaaatatctgaaacaaaaagcattgttgtttggccatgatacaagtgcactgtggcagtgccgcttgctcaggacccagccctgcagcccttctgtgtgtgctccctcgttaagttcatttgctgttattacacacacaggccttcctgtctggtcgttagaaaagccgggcttccaaagcactgttgaacacaggattctgttgttagtgtggatgttcaatgagttgtattttaaatatcaaagattattaaataaagataatgtttgcttttcta

SEQ ID NO: 78 - DNA, 54000 bp, Homo sapiens
attaattcatttgaaagacatcaactacaatttaaaaaaacaaaacaaaaacagaaaaggtggtttgcaatttttttcacttcatgagactataatttatttccctgggtaggccacacaaatccttaagaacatggactttcccccatacaaggctgtgaaccgtgcacacagagatgctcgataaatggtaccgaatcctctccttcagcacctggtcctctctggcagtctccattctcttacctctcactgccccctctacttctctgaacctgcagtccccaaagtcaccaatggtctccatagcaacaaaatttagtgggctcttatacgaccttatattgcttgacttcttggcagcaactgacactgactaccccttgaagcatcccctgcccaggccttccacaatgtcacactctcttgcttctcctccctcctccttggttattgcttctcctatcctcacggctcagctctagccctcttctcaatcacttccttttccctaaaatgattttattcactcctatggtttcagttacttttttttttttttttttttgagacacagtttcactctgttgtccaggctggagtgcaatagcacgatcttggctcactgcaacctctacctcccggttcaagtgattctcctgcctcagcctcctgagtagctgggattataggcatgagccaccacgcccggctaatttttgtatttttgtagagatgaggtttcaccatgttggccagcctggtcttgaactcctggcctcaagagatctgcctgcctcagcctcccaaagtgctgggattacaggcatgcaccaccacaatggccttagctatctgttttttaatgacaattcctcattgagttcaaagcagcctcctgaacttcagactcggtatccaaccattactcaacataattactcaaatgtccatagatatttcaaattcagtatctccaaaatgtaaactctatcttattctcttcccaaaaccttgctgctcctcccatgtttctgctctcaataccactcctgccacagtggctgcccaggtcacaaacccagaagtcaccttcacatttctgtctcctaccttccccaatccctcattgtggtaggagttattaagaaattattttaggcagatagagaggaaaaggggtccttgaaaagtttttgtctcttttgaagcagctcctgagacgtttcctgtctagcataaaagccctgacttttagacccgagctggcaacgtttgatatgcaaatgccggcagttagaaactgggtccaccaacacggtgattcccaccatcgtcctcttgcccttgttctcacaagtgcctggcaacatggccacccccacatatccccacatgagtagaacatcatagcgccctgcatttgcatattaaaaggctagggtggaatggccagttttattagggggctacatgaatgacatgcgtggtcaaaccagtcccctgagccctatgcaaatcagacaccgcctcctgcatcctcctcctataactggctggtatctcccacgcactctgggtctcctctctcagctttggagcacccatccctctgtctctgtacaggggagctgcttctttctttcttctcccttccttcttgcttattaaactctccgctccttaaaaccactccacgtttgtccatgtcgttttatgtaattcgactcaagacgaaaaaggctagtattcctccactcggtatcatcaccacattctgttgagtctctttacgtccaaagaatctctcaaaatgggctatttccatctttaagacactctcttaaaccaccatcgtctctcccaagattccttcaacagcaactgcttttttctgcagccagtgatctttctaaaaggcaaacatgaccacatgtcttcttttaaaatatttatatagctccccacatcctttaaaaggtacactttggccaggtgcggtggctcacgcctgtaattccaggactttgggaggccaaggcaggtggatcacctgaggctgggggttcgagaccagcctggccaacatggtacaacctcttctctactaagaatacaaaaatagttggacttcgtggtgcacgcctgtaatcccagctgtttgggaggctgaggcaagagaatcacttgaacccaggaagcagaagttgcagtgagcggggagattgtgccactgcactccagcctgggggacagagagagggccgtctcaaaaaaaaaaaaaaaaaaagtacaccttaatctggtttcaaggtgcaagatctgcacctatccttccatttaagtttcatcaaaccgctgctacctccccgtctcccacacaatttatgggacttctaagttccctctaaagggtccgaacacctacactggtaacaagccacctggatttgaatcctggcaagacaacttactatctgaccttggacattgtgctgttcttaacctctccgtgcctcggtttcctcatgtgtatgaataacatcaacacctacatcaaagtttgctgtattaaatttgataatatatgcaaagcatttagaaaagtgcctagctcatagaaagccttatgtaaatattaactatcattttttttcttttttggggtggtgggggaggggtttcgcttttgttgcccaggctggcgtgcaatggcacgatctcggctcaccacaacctcggcctcccgggttcaagcgattctcctgcctcagcctcccgagtacctgggattacaggcatgcaccaccacgcccgggtaattttgtatttttagtggagacggggtttctccatgttggtcaggctgatctcaaactcccgacctcaggtgatccgcccgcctcggcctcccaaagtgctgggattacaagcgtgaagcacctcgcccggcctagctatcatttttatacaagtgctgggttttgggagaatgtaatgatggcttttttcttactaaactttcagtgcaggaggaggagaaagaaagtaaatagttatatgaacacagtagaaagtcaaagtggaaaacaaaaagaacatagaacccaggtgagcggtccagacctccccccagaaacctaagaatccatagaaatgggtgggaagcggagaagatcctccagacagcaggtggcgatgtagcatcccccagaaggcccgctaacagaagctaggaggacgcgctaccaaggtcacgtgtccccggcgttcactcgctcttcgcttcacgacactcgcatcctcacgggtgattggtctgcgtgcggcacgtgggcggggtaccggggcgggccggggaggggcggggtgggcggaggagaggggcagggggcggagctggagggggtggttcggcgtgggggccgttggctccagacaaataaacatggagtccatcttccacgagaaagtgagtgtccgcgttcggtggggagctgtctgccgcgcggtggcgggcgtggagcgcggcatcaccgcctctcggagggctgggtggggcccgagtcgcccccatgccgatctcgcccggcgaggggcgacgccgcagcctcccgcctcctcggctcgaggaggggagcatcacctacgcccctacttcccccgcggcccccgccctgggagccgggagggagtatgggcggggccgggggcgtctcgggacacgggagtggggtggcgcccagtgggtttgcttctgcctttctccgtcactttccatcgcttttcggaggattccttcacccctccccaatccttccctctccctagggtctagctagagtcatctctgggacacctccctcaacccctcctaccctaatcctggcagaattaacttttcctcctccggactgctcaattctatattggagtcttccctacacgtagatctttggggtcttgttcgtgtctttcccctgcactaggtccgcgagcctcccgagggaggagaccttggctcgcccactgtagggcctgacatttaggaagtgaagtaggaaacccggcgtgcccctaaacagggaagtcgtcacaagagtttttattacgggatgtttgggtttggtttcttttggtactcccatctttccggagcaggcggccagctttgtttttaggtattaggagtggactgggatgattttgttgtagtctgcctagcctgctgtccctttaactcttccgtgaccatgcacttgaagatactgtttgtgatatgtaaagaaactcctcgtttctctcatactattatccagccatttgtgtgtgagtgaagccttccccaggacagctttggcacatggtatcatgtttcataatagtttcgtgtttggaaagagttgctggtaaggctgttatttaataggaggagcaaagggtttttgttttattaaatacttataaatgatcatttatcccagacatttaaaattcacacacacacaacaaataaagcaaagacaaaagaatacatttaccaaatgtaaatctgtagcataaattttttttaatttttattttaaagatggggtctcattctgtcacccaggcaggtgtgcaatggagagatcatggctcactgcagccttgatctcctaggcacaagcgatcctcccgcctctgcctccagagtagctgggactacaggtgcatatcgccagggccaggtaatgtttttgggagagacggggtctcgctgtgttgcccaggctggtctcgaactcctggactcaggtgattctcccacctcggcctctcgaagtgctgtgattacaggcgtgagccactgtgcctggaacaaattgttaagtacaatgcttttcattgtagaaaacatctcggaaacttttgaaataggctgatgttcagtgggggaggaaggactcagtcgtatagttgtcactaattttttgacttgattgacatgactcgtaaatcatagacaatagagatttggttgcttggctgagtagagtgcgtgaaaaatacacacgtacttttttttttttttttttgagatggagtttggctcttgtcacccaggctggagtgcaatggcgccatcatggctcactgcaacctccgcctccccgttcaagcgattctcctgcctcagtctccccagtagctgagattacaggcgcccgccaccacgcccagctaatttttgtatttttagtagagacagggtttcaccatgttggccaggctggtctccaactcctgacaggtggtccgcccgcctcggcctcccaaagtgctgggattacaggcgtgagccaccgcacccggccatatttttgttattaattttcaaaggctttggtgtgggaccacatttcaacatggaaggccttaaacatgttccacactacttcctgagaattagacaagatttttaacaatattgttacctagttgggacacatttgtactgacccatgggatgaaaaaaagctgagtgctagcctagtgaaaatctacttacccgaaagaaatccctcttagtctgggtgcagtggctcacaccagtgctttgggaggcccagacgggcggatcatgaggtcagtagtttgagaccagcctggccaacatggtgaaaccccgtctctactaaaaatacaaaaaattagccaggtgtggtggcaggcgcctgtaatcccaggtactctggaggctgaggcaggagaattgcttgaacccgagaggcagaggttgcagtgagccgagaccgtgccactgcacttcagcctgggcaacagagcgagactccgtctcaaaaaaaagaaaaggaaaaaagagtccctcttaattatcagcatgtgtataggcctacagatacttcaggaatacctttaccattatcatcaacttgtatctacatagcatgtgaagattcaacaatttagttttttgggcgtcctcaagagtacgcacctataaccatatggcccaattgttaatctcctatacagtccattctgggaatgtttgggcttactgtgccatttttccgttcactgccttcccctctgcaatatacctttaacccttgctaggtcctgggtttggagagccagagaaccaactttggccctaaagaagctgtgtaggtagcaatatctgcctacgaagggccttgcaaccatttcctcttggaaccttggtttcctctttctgagtagtcactttgagtaccctttattaagttagaatgtaaaaacagtttctcactgatatatctgcagtgcctgagagagggcctggcacagagtaagtactcaataaatatttgaatggggccgggcgtggtgagacctgtctctacaagaatgaacaaaattagctgggcgtgttagcacatgcctgtagacttgggaggctgaggtgggaggattgcatgagtctgggaggtcgaggctgtagtgagccatgatcgcaccactgcactccagcctaggggacagagcaagatcctgtctcaaaagaaaaaaatgtatatatttgaatggataaagagatggctttgagtttctgagatatatatggtgctgtttatctaaagtaaacaagttttctgtaaatattttaaggctttgcaggccagctgtagtctctgtcacacattcttatttgtgcatgtttttcccaaccatgtaaaaatgtaaagtgcattcttagctactggggcaggttgaatttggcccatgggctagagtttgccaacccctaacttaaacctttgtactaactttatgaccactactggatttttgttgttgtttgttttagttctggtgcctgctttgtttttttttttttttttaatcctcttgctgatgtttcttggtgcagttactgtgccatttgtattggtgcttttaatgtaatgcaaactggtaataatatctaaacttgctggggttgtacataaaattattgaaaagattgaaaagatgctgagcattgactctgtggcattcattatgcccttttgtgattgctggattttagccatctttaggacatttgagctttaggagaagccaaattctgtataaatgacttgaagtgctaatagcacaggttttgaaacctctgcctgggtttgagtctcagctctgccttttactacctgtgtgatcctgagcaagttacttagtatccctgtcctctagtttcctcctctgtagtgtggggataataacatagacataacctgagagttagagtgtagagaaggctccctggcagatagtgctgtagaagtactggccattgccattactcaggtgcttgtgtttgctgaacctcatagtaagggctcggagagcactaagaggaggtgagaaatgctgctagattgacagcttgtccccagatagcccattcccgagagcaccttaggtttatacctgatttgtgttgtagttagtagtgtctctggtaatttgaactagtttcaggttggtcttgaaaacctggggaggttgggggtaaatgatttggtagcagttctcttttgtgattttatacattatctttgtagaactgcagtttgctaattctctgagcccaacacaatgaagtctgggcctaaaatcatagaatttcttttatttttttttttgtttttaatttatttattccctccctccctcctttcttcctttcttccttttctttctttctttccttccttccttccttctttcttttctttctttcttttctttctttggagtctcactctgtcaccaggctggagtgcagtggcacgaactttcttcagagtctcactttgtcaccaggctggagtgcagtggcgcgaactcagctcactgcaacctccgtctcctgagttcaagagattctcctgcctcagcctcccgagtagctgggactataggcatgtgccaccatgcccagctaattttcttatttttagtagagacgaggtttcaccatgttggccaggatggtcttgatctcttgacctcgtgatccacctgcctcagcctcccaaagtgcggggattacaggcgtgagctaccacgcccagcctattttttattttttgaggcagagtctcactctgtcacccaggctggagtgcagtggtgcaatctcagctcactgcaacctccgcctcctgggttcaggtgattctcctgccttagcctcctgagcacctgggactacaggcgcctgccaccacacctggctaattcttatatttttagtagaggcggggtttcaccatgttggccaggctggtctcgaactcctgatctcaagtgatcaacctgccttggcctcccaaagtgctggaattacagccatgagccaccatgcccagccaaatcatgagatttcaataccgctgaactttgattatggcaaagtgaacttctgctttgattaaagcttgatgagagaggtggctggggatagtttgagataagggcaaggcaggaaaatgcataatcttacgtgggctcattgtcattgtacaattcttttggtccatgtggaatttgatccgtcctatgacttaagttatgtttatttttgtttttatttttatttattttgtgtctttttgagagacatgatgttgctctgtcacctgggccagaatacagtggcacaatcttagctccgtgtagccttgaactcctgggctcaagtgatcctcccacctcagcccctcaaacagttgagattatagtatgaaccactgtgcctagccttaagtgatttttaaatttgtactgaacagtttgtcctttccttccattaaatcatattagaagtacagaacttgatatttcctgtagcaatacagtttttctttgatgaagtttgatttcaagtacttatttttcataatttaaagctattttttatagagagaattttaatcaaatatttggatgtcactattgctatatatggtattaagtatggtgaccatagtttgtaaactccaaactgacagcaagacaggaaatttgtgttagcaaaggcttttttcttactgtttgaattttttaaaaattagatacaatacagagaggagcacacaaatcattaagagtacagctcagcgaattttcacacagtgaacatgtgtaaacagcaagtaacaaaagatttacctgcatcctataacctcccattattcccttttctaggtactgtctctccactgcattcccaccaaatataaccactatgctgaattctgacatcataaatgagttttgcctgattttgagcttttgtgactggaagtgtacagtgtatataccctttcgattctgtcctctttagtttaccattgtttgagaaatttatccatactgttccagaattaactactgttaattattgttaattaactactgttgtagttaattcatcctcattgttatctagtattcttttgtgagtaaacacaatttccattctactgtgatcccagctatccatttgggtcgtttccagtttggggtccattacaaatagtaatgctatctgtaatgctattttgtattactacaaatagtaatgctatttgtggcacaaaaatactgcttttgtgaacattcttatacatgtcttttgatgaatgtatgtttgcattgctgttgtttacattatgtacctagtaatggaattgctagatcataggagatgtatatattaagctttagtggatgcattacataattattagttattattggttataccaatttatcctctcatcagtagtatacaacagtttctgtatctctaatctccaacattttagccattttagagtttgtgtactaacacattgtggttttaatttacatttccctgatgactaataaagttgagtacctcttttgtgttctttatagccatttgactgtcttgtgaagtgcttgtttgtcttgcctatttttcttttctttctttctttttcttccttccttcctttctttctttcttctttctttccttccttcttttctttctttctgtctttctttcttgtctttcttgtctttctgtctttcttggtcttgccctgtcacccatgctggagtgcagtggtgcagtctcagcttactgtagcctcgacctttttggggctcaagttatcctcctttctcagcctcccaagaagctggactacaagcacgcaccaccatgctcagttaattttttattttttgtagaaatggggtttcaccatgttgtccaggctggtctcaaacttctgggctcaagtaatcctcctgccttggcctcccaaaatgctgggattacaggcatgagccaccgcagccagccttggctatttttcaaaaggatataagtagaacatctgtatatcccttcaatttgcatattattcagtaagagttgcactctggtagtagaaatatataaggaggagaaagaagtggaaacaaaaagtctattctcatgagaagacttgggggatagtgttctctctagctccaagctacttattccttacgaaaagttgaagataaacttatctcagactgaggctgtctcaatgttgtcttcctattccattatacacatataacccatatttttttcaccagctgaattttgctcctagaaaattgattcatcaggaaaaatatccgtcttgcaaggtggttctctttagagtctgctgtgtgacatagctcaggacaaattgtgtgatgtcagataggttgggttaaggaatagaccttattggggaaagagagaacttggagggccaaggttagcaggagaaggaaatgttctctcatctgccgtcaattcagggaggggcaaacctggtgtctgtgttcacagggagggatccatccatctgtgattctcccttcttatcaggtagcatgggaaagctacactgttgcggggaggagggtcacacgcaggctacttagtaccaggcaccctggacttggattcaggttgccagttgtgtgagaaactgcccagcacctgaaggccctgaacccatgagaagttgtacctacctcccatgaggaggaatcctgtcatcccatgggagctgagcttgggtgcagtccctcttgctggcttgtccaggagtgagctccagggttgtttgggacagttctgctcattgctttacactgtgtatacattatctgtagagttccatgaagagaacttcagcactgtaactgcaagttttaacatggaacagaatttttctcacctgtattaattcttaagatttgaagttctatcaacaagcatttagattgtgtggagatttttttatttttatttttggagacagagtcttgctctgttacccagactggagtggcagtggcatggtcttggctcactgcaggctctacttcctgggttcaagcgattctcatgcctcagtgtcctgattagctaggactacaggtacacaccaccatgctggctaatttttgtatttttagtagagacgaggtttcaccgtattggtcaggctggtctcgaactcccagcctcaagcagtccacccacctcggcctcccaaactgctgggattacaggtgtgagccaccatgcttgactgacatcatcatgttaaaagaataaatgttctagggagctgggcacagtgtcatgtttctgtagttctagctgctcgggaggctgaggcaggaagatcccttgagccctggagttcaagtccagcctgggcaacatagtgagatctctttttttaaataaataaataactgttctagggactaaaatttcctttcaccattagtaatttactgtagaatctccaagaatgaacttattttaggtactgaaaatgagggagactaaatgttttatacagtagtttttagtaaaatatgagatttgatgcatttgatagatgatgtttgtttaaaataattcttaaatttttgatcatgtaattatagtttcattaatggtagatttgtaaaataaatgttaccaaatgaaaatgcatgtacctatgttaattatccttatctaaagctgaaagttcagttcaactatgttaaaacatagtaggggcctggcagggtggctcttgcctgtaatcccagaacttagggaggccaaggtgggcagatcacgaggtcaggagatcgagaccatcctggctaacattgtgaaaccgtatcgctactaaaaatacaaaaaattagccgggcatggcggtgggcacctgtagtcgcagctacttggtaggctgaggcaggagaatggcgtgaactcaggaggcagagcttacagtgagccgagatcatgccactgcactccaggctgggtgacagagcaagactccatctcaaaaaaaaaaaaaaagttggccaggtgtggcggctcacacctgtaatcccagcacttttggaggccgaggcaggcggatcacaagatcaggagtttgagaccagcctggctaacagagtgaaaccctgtatatactaaaaatacaaaaattagccaggcatggtggtgcatgcctgtagtcccagctacttgagaggctgaggcaggagaatcacttgaacccgggaggcggaggttgtggtaagctgagattgctccactgcactccagcctggacaacagagcaagactctgtctcaaaaaaaaaaaaaattaatgattaaattatttaggggagccgggcgcagtggctcacgcctgtaatcccagcactttgggaggccaaggcgggcggatcacgaggtcaggagatcaagaccatcctggctaacacaggatgaaaccccgtctctactaaaaatacaaaaatttagccgggcgtggtggcgggtgcctgtagtaccagctactcgggaggctgaggcaggagaatggcatgaacccgggtggcggagcttgcagtgagccaagatagcgccactgcactccggcctgggtgaaagagtgagactccgtctcaaaaaaaaaaaaaaattatttaggggaagatactatacaattctgtttaacaagtcacattttaattttttcttttggaaatattagcaagaaggctcactttgtgctcaacattgcctgaataacttattgcaaggagaatattttagccctgtggaattatcctcaattgcacatcagctggatgaggaggagaggatgagaatggcagaaggaggagttactagtgaagattatcgcacgtttttacaggtactgattttaaactcactaagtcacatttcttttttttttttttttttgagacggagtctcgccctgttgcccatgctggagtgcaatggcgcgatctcggctcactgcaacctctgcctcccgggttcaagcgattctcctgcctcagcctcccaagtagctgggattacaggcacacggcactatgcccggctaattttttgtatctttgttagagatggggtttcaccatgttggtcaggttggtctcaaactcctgaccttatgatccacctgtcttggcctcccaaagtgctgggattataggtgtgagccaccacacccggcttacatttcttttaaaaatgtggataccatttagaaaaggatgggccattcttcctatagggatctgactggtgaattataactgtgctgttaactttggaaatgggaatgcacaagatattgttttaaatatgcacgctaatgacagtttgtatccttctttccccacccccacccttgcttcaactacctgtcaaaattaacagcagccttctggaaatatggatgacagtggttttttctctattcaggtaagtagtcacaagcatgtactatgtgttgcttacatcccaggcaccgtttcacagcctttcaatagtcactgtaacaaggcgaccttcggaagttcttctgtctacagagtatagattatactctagagtactagattttttttttcttgagacagagtctcgttctgtcacctaggctggagtgcagtggcgtgatcttggctcactgtagcctctgcctcccgggttcaagcgatcctcctgcctcagcctcccaagtagctgggattacaggcacccgccaccacaccagttaatatttgtatttttagtagagatagtggggtttcaccgtgttggccagtctggtctccaactcctgacctcagcctcccaaagtgctgggattacaggtgtgagccactgcacctggccaactagagtactagatttttatatagataaacatgaaaggattgtagaatcttcatattagagtggggcatttaaaaattccttcttgagaaagattaatttgcatctggatgctaataataaccttaattctggccgggcgcggtggctcacacctgtaatcccagcactttggggaggccgaggtgggcggatcacgaggtcaggagattgagaccatcctggctaacatggtgaaaccccgtctctactaaaaatacaaaaattagctggacgtggtgacacgtgcctgtaatcccagctactcgggaggctgaggcaggagaatcgcttgaaccagggagtcgtaggttgcagtgagccaagatcgcgccactgcactctagcctggtgacagagcgagactccatctcaaagaaaaaaagaaatccttaattctaataagtcacaatgtctcaaacttaccatctgttgggtaaatttgagaaaatgcaataccttgctaccatccttttaaatcagcctaccagactggatttccttattatggtttgtggcttttgattttttttttttaatgtatagctctctttgaattctttggtggttatatatatatgtactcgcaagattcttttatctgtgggtctttcattctttttctaacactgtgagttgtatccagagtactttcggaacctctcctgagcgacctatctctgcagatatctttgtttatgtttcccttgtactgccctcctggactcttcctcatccaccagcatttccatctagtgctttaccgtgccactgctaacaggtaatggctactgcagggctgaaatcagaggccagagtaggcccagcacttggcgtttcctatttgtgccttgctgctcttggtgcctgttcatgtgtgcccactaccttgcactcaatttctgtctttgctggtacctggctcacttgcttctttgttggctaccttggagggcagatagtgaattttcagaaatttccctttttttgtcagacagattgaaataaacaggtttgcattttgttttttctacaagcggcaagcccatgaccctagaagtctgacatctatggaaccttcagtttaaatgcccagggagaacttattttggtagatatgatttctgacattgcaggtagcaagttgaatataatttttctaaagtagcacccacagcagccaaattatcagatgtatatagtagactagttttaagaaaagcacttatgggtagaatatacatctggatttttgaggcagttttatttaggaattgtgtggttttctggaacatctcagagacctggtatgaaaagcactcttctaatatatatgtgtttttttttatggatttagtgatatatctatacacacacactttttaaaacctatagccggctgggcgtggtggctcatgcctgtaatcccagtactttgggaggcccaggcgggtggatcacaaggtcaggagattgagaccagcctggccaacaaggtgaaaccctgtctctactaaaaatacaaaaatagctgggtgtggtggcgtgtgcttgtaatcccagctactcgggagcctcaggaggagaatcgcttgaacctgggaggcggaggttgcagcgagccgagatcgtgccactatactccagcctgggcgacagagcaagactctgtcacaaaaaaaaaaaaaaaaacctatagccttctagagaaatttatatatgaagtacacaactaacatagctacacttcctaaatttggaatggagtggtttagcttatgaaaagttgctatttttcttaacaggttataagcaatgccttgaaagtttggggtttagaactaatcctgttcaacagtccagagtatcagaggctcaggatcgatcctatgtaagattctgttttgcatttcatacatttcttttcccaaatttgatttttaaagttgtaatttcttaaagaagagaaatacattttgaatacttttgttttgatgttccctgtttcattcactcagactttcctatttcacctttgtgatgtccatgagcatctgccctgtagccttcctggcaccccagtgtctgtggcagcacagagctgaccccataagtggtgcatgaggccatcttgtggcacagcatcactaagctgctgcagagacgttcatatggttgtgtgatcttttaaaaacatcagtgacacttaactataaatataatcttaaattatcacaaattttatataatatttgccagtagacaacataaatatgaattcaatatttcaagttaatattgtctgttttcttttttagaaatgaaagatcatttatatgcaattataaggaacactggtttacagttagaaaattaggaaaacaggtaacatttcttacccttccttgtctttttttcttatattgtaccccatttaaaactaaaatgtgggccaggtgtggtggctcatgccaacagtttgggaggctgaggtggggggatcacttgaagccaggagtttgagaccagcctgggcaacaaagggaggtcctgtctcttaaaaaaaaaataaaaataaaaataaaaataaataaaaaaaaaaacaaagagccaggcatggtggctcacatctgtaattccagcttacttggaaggctgagtcagaaggatcacttgagctcaggagtttgaggctgcagtgaactatgattttgtcactgtaccccagcctgggtgacagagtaagactgttctataaaacataaaaataaaaaaaatatatttaaaaattaaaaaaaaaaaaggattgctgactttaaaattaggaaactgaccagtaatgtgtgtgtgtgtagcatggtttatccttcttgatagatagaaattgtcattttaaaagataatatcagttttccttataaatttatttgtgacaagtatatgcaatttaactatatcataagaaaaattctatattaaagataatacaaatgtggttacttttaagtgggtttttatgtgatgactatgttctgtcagttaattattacatttatagatttgtatttagcatagtgctgtcacaaagcctgaaatagtgtcaagcatgaataaagcattcaattatgtttgctttagtgtaagattattcattatgattccaaaagccatgtaatacgtacgtctacagaaaatcacttctattttttaaataaaacatgaaatatgtcttgagcaagctattttaagaaacaatcatttaacgtccttgttattagaattttgaatctttgaaagagggttattgaaaaccagctaggacagtaaaaaagaataaactagtgatacatgcagcaatatggatgaatctcaaaataattatgctgaaagaataacccacaaacaaaatactacctgctgtatggtatcatttattaaaagtctagaaaagtgcagattcatctgtagtgatggaaagcagattgaccagcggttgcctggggacgagaaggctatggaggagtgagaggggagggttacagagaggcacgggaaacatggcaatgaggaatgtgttcactatcttggttgtagtaatggtttcatgggagtacagtatacaaatgtgaaaacatttcagaggccagatgcagtggctcatgcctgtaatcccagcacttttggaggccaaggcaggaggattgcttgagctcaaggagttcaggaccagcctgggcaatggcacaagaccccatctctaaaaaaaaaatgaaagaaaaaaaaattggctaggcgtggtgatgcatggccgtagtcccaggtgctagggaggctgaggagggagcacagaggtcaagcctgcagtgaatcatgatcgtgctactgcactccagcttgggtgacagaaggagatcctgtctcaaaaaaaaagtttcaaattatacactttaaatatgtgcagtttattatatgtcacttataccccaataaatctgttttttttaaaatgtaaatacaagccaaaaaaggtataagtcaagaaaatatattgaattaaatctgtaagagataattcaaaaacaaaaaccctattgttatcttttaagtcacccaaatcaaatttgggaaaagtcacctacttagcttcatcctaagttggttctttctttctttctttccttcttttgagacggattcttgctctatcgcccaggctggattgcagtggcgggatcttggctccctgcaacctccgccacctgggttcaagcaattctcttgtctcagcctcccaaatagctgtgtctacagccacgcaccaccacacccagctaatttttgtatttttagtagagacggggtttcgccatgttggtcaggctggtcttgaactcctgacctcaggtgatccgtccgtctctgcctctcaaagtgctggggttacaggcgtgagccaccatgccgagccctaagttggttctttcttaaagttcttcctgaggagccaagagcaagttaaggagatgtaacctagaagcttacagtggaggctagctgggtgcagtggttcacgcctgtaatcccagcactttaggaggctgaggcagggagatcactgaggccaggagcttgagagcagcttggcccaacacagtgacaccttgtctctacaaaaaaaaaaaaaaaaaaaggcagcttacagcagtagaggctgatgcgagtgggaatcacctctaggtaaaaaccagtgtagcgtactgctgagattatttaacctctgggttttatttatgtgtttttaaaaattatgatccagtattttttacttttttttgtataaagtaagcactgaatttttaaggttgtattaatttgcaaataaatgtctatcttattattttgagagatttaaaaaattttagttcttcaaaattgcattttcacattttgaattacgttatctttgacaaatacagaagatgtcaaattttggtttattttctttggttctaatttatatttttgtttaaaactatatttttcactatagactctttctgtctctcgaggtccctgtataatgaaaaagaaggctggaaaaagtattaacattgtcaaaatccaggaaaagtagttggtcatgatattgatcgttaactttagaaactttttgtatcttgtgggttaaattaggattactatgtggtagtgataaatgatgttaattagggccgagtgcagtggctaacacctgtaattccagcatgtagggaggctgaggtgggaggatgtcttgaatccaggagtttgagaccagcctgtacaacatagtgtaagaccccttctccacacaaaaaaattagaaaatttgtcaagcatcttggtgcacacctgtagtcccagctgcttgggaggatgaagcgagagaatcacttaagcccaggtgttcgaggctgcagtgagctatgattgcaccactgcactccagactagatgaccatctcttttaaaaaaatgtgtttatatgttatatgtgatagtgctttttaaaaacatttttaaattatagagacagggtctcactatgttacagcccaggctggtctcaaattcctgggctcaagcaatcctcccaccttagctaacctcccaaagtgctcggattataggcatgagctgcatgcccagctaatttagtgatttttaaaaactgagctggtaattataaattctcttcctggaacttctgactttctcacaattggaatcttttgacaaaaattatcagtaatgggaaaactttgtgtagttgtcatttttcctcccatcagtgtgatagatatgattggagttatgttggactgatattttgaaaaaagatttaattatagctattaataaagacatttaaactactgactatgcatttttattcttttgggagggtttaatgtttatagtttaaagcaaactgttgtttttaaaaaagtatctaacagggccgggcgcggtggctcacacctgtaatcccagcactttgggaggcctaggcgggcggatcacaaggtcaagagatcaagaccatcctggctaacatggtgaaaccctgtctctactaaaaatacaaaaaaatagctgggtgtggcggcgtgcgcctgtagtcccagctactcgggaggctgaggcaggaggatggcatgaacccgggaggcggagcttgcagtgagccgagatcgcgccactgcactccagcctgggcgacagagcaatactctgtctaaaaaaaaaaaaaaaaaaaaaaaaagagtatttagcagaggccaggtgcagtggctcatgtttgtaatcccagaactttgggaggctgaggcgggcggatcatttgaggtcaggagtttgagaccagcctggccaatgtggcaaatgtgctgtctctaactaaaaatacaaaaattagctgggtgtggtggtgcagacctgtagtcccagctacttgggaggctgaggcaggagaatcacttgaacctgggaggcagaggttgcagtgatccgagatcatgccactgcactccagcctgggttacagagtgagactcttctcaaaaaaaaaaaaaagtatttaatagtgataaatctgcagtattctcttgtagtttttaagatcatattattcagtcaaagaaaagagctcaacttgaaatatttccagagtttaaacaatcttactaagctttgatgggttgtatctattcttaacatgtgaaacttccttattacctataatatacactaacttaaatattgacaatttttttccagtggtttaacttgaattctctcttgacgggtccagaattaatatcagatacatatcttgcacttttcttggctcaattacaacaggaaggtaagtaacggctgaacattttgtaatgttacctttcgaagtagttaaataaccaggcacattagatgacagtgtgataaaactgtttttctggcagtggcagtgaaacaatctttagttttgacgtggtgataggctgtgatttgggtgacgctgttcagttagagttctcactgacacctggcccttcctcttctgaggatgctgctttctttgcagcccttctaagtaatggctttttcttttatacatcacatatcacacggctgagaggagggatagatgtttttcttctttgcctcttctaggccactgttcttccttataaactccagtttctttgaaatacatgcccctaacggctgggcacggtggctcacgcctgtaatcccagcactttgggaggctgaggcaggcggatcacgatgtcaggagatcgagaccatcctggctaacacggtgaaatcctgtctctactaaaaataacaaaaaattagccggggtgtggtggcggacgcctgtagtccgagctactcgggaggctgaggcaggagaatggcgtgaacccaggaggcggagcttgcagtgagctgagatcgcgccactgccctccagcctgggcgacagagcgagactccgtctcaaaaaaaaaaagaaaagaaaaaaaaaagaaatacatgcccctagattaaactatcccttgtccttttgcactcatccacaagtctcttttcatcagtgattttaggatctgactcgttgtctttttctctacttcaactacttttatcattcttaattatttctgtatcgtcaatcaatccagtacctgcctcttagtttcaaaatcacttactcttgcttagctattaccagtaatcataaccactgtcaaatctcaattgcaagcatattactctttaactaccacctcctatctttaaaccatgttttgtctgtttttttattccagccattctttaaaccctactgtggggcccaagcatttcctttatacgcattcttcctttcttctactgcttattttctgtaatccgtcatcataatcactccattgcattcttcaacgtgtttcccctctctccctccatcatacttgaatgacaaaaatctcaaccctggttaaaccacatcttggccttgtccattcctgtaccagagtagctggacgtggctaaaaaataacataaaacatgatgattggttttacttttttcttaaatgatctatccatccattcacccatccatctatcaaagtgactaggcctatttctgaagcccaggctggagtgcagcagcataatcacagctcattgcagctccaaactcctgggctcaagtgattctcttgccttagcctgttgagtagctgggactacaggcttgtgctaccacacctagctaaggttttactttaaatttattataatcacaaaattcagatgagcctttagtgctgtctgatatttctactatgttttcttagtgatgtaccaccctccaaggtgtttataaaaaattatgtaccactctccaagaagtttataaaaaataatgtgccaccctccaaggtgactaatttcacagcttatgtctttaaacctttaagcactttcctctcccttacacaccttccttgtggctttccgttacattctgctgagaacatagaagcaattaaaattatgttctttctaccagcaaatttatcaatttgcttatatcttcacctgtgctttgagcctatttaaatagatgaatggtcccctacctctaaccaaaaccagtccctcacttgtgggctggatcccagctcttctcacctactcaagatgttcctgctttcatctctccactctcttatataatcagttccccccccctttttttgtaatattcctataagcagtaaaataagctttttatttccattgattaaaaataaaaatcctctcttaattccatgaaactccagctgcctccccatttttattttttccttaggattgtctctagtgtgccttctccttttcttgaactctgcctcctgggttcaagcgattctcctgcctcaacctcccgagtagctgggattacaggcgtgcaccaccatgaccggctaattttttttttttttttttgagatggagtttccctcttgttgctccggctggagtgcaatggcgtgatctcggctcaccgtaacttctgcctcctgggttcaagcgattttcttgcctcagcctcccgagtagctggatttacaggcatgtgccaccatgcctggctaattttgtattttagtagagatggaaggggtttctccatgtttgttaggctggtctccaactcctgacctcaggtgagccgcccacctcggccccctaaagtgctgggattacaggcatgagccactgcgcctggccccggctaaattttttttttttttttttgtatttttagtagagacagggtttcaccatattggccaggttggtctcgaattcctggcctcgagtgatccacctgcctcagcctcccaaagtgctgggattacaggcgtgagtcaccttgcctagccatcttttagtaatggtatttggagatcacaatttgagtgctggcatgcttattgctgctgggtttgttatgtagttattgtgaattcacatttaggaatatagggtttttaattctttgattttagatacttgtatcttttttcttttatatttaaaaccttggttcctgatgatatcccttcttagaaaccctgtctacctttggccttcagcccaccatgctgtggttttcctaacttgctgcctgcacttttcagattcctttcatggatcttaaatatcatctgtaaataagatctatgtgtcaataattaccaaacttttatctttagtcttgacatctaccctgaacacctagctttgactaactcctagctttggcatctccacttggaaatccaaaaagtgtttcaaactgaacatgtctatgaaagacttatttttttctctctatccatgctatccatcaggttttccatttccataagggtgactcttgtactctggttcctatatattataccgacagagcagcccagagtgcttcttaaccagtgtaaggcctgttatgtcccaccctcactctttgtccttcagtggcttcccagcacacttagaataaaatctgaagtcttaggccgggcttggtggctcatgcctgcaatcccagcactttgggaggatgagggggcagatcacttgaggtcaggagttgatgagaccagcctggccaacatggtgaaaccctgtctctaccaaaaaatacaaaaattaactgggtgtggtgttgtgcacctgtagtcccagctactcgggaggctgagataggagaatcacttgaacccgggaggcagaggttacagcgagccaagatcataccactgcactccagcctgggtgacagaacgagactctcaaaaaaaaattaaaaaaaaaaaatatgtgaagtcttgaataaaacccaagatctttaccatggcccctgaacagggcagagtatccattcttcagacactcttcatagaataccatggtgagctggcatatttattatacaatacagaaacaattttactggcagaaaacacattaaaccgtctaaactctgaatacagttgtcctcataaaaaatgttcaacatactattttgaggttttccattaatagttcttataatctttgtcccattatgtgttaatccaacaaaggatatccaataacaaacaccaaagtttaagaaaaatgtgctaggcgcggtggctcacacctgtaatcccagcactttgggaggccgaggtgggcagatcacctgaggtcaggagttcgagaccagcccagccaacatggtgaaaccctgcctctcctaaaaatacaaacattaactgggtgtggtggtgggtgcctgtaatcccagctactcaggaggctgaggcaggagaatcgcttgaacctcctgggaggcagaggttgcagtgagctaatattgcaccactgcactccagcctgggtgacagagtgagactccatctcaaattaaaaaaaaaaaaaaattaatgatagagaaacttaaatcagttagattgttttaggtatagcccatccttggtttttgtgtgtagcatctagcttggggaaaccctggatttctggaatcatatttagacacagtcacactagactaatgtaattcttttgggatgcaaaccacacgtttgacaccttaaatagcttttaggtatttggcttcccagcccctatttttagttacaaggggtgtacatgtgtgggtcagggtgggggtagctctttccgcagatgattagttttagccatgttactagttattgcacacattatctgtgtcctcacagcagccctgtgagtaagtgtattagggttctctagagggacagaactaataaggtagatgtatatatgaagggtaatgtattaaggagtatcgactcgtatgatcacaaggtgaagtcccacaataggctctctgcaggctgaggaaccaggaagccagtccaagtcccaaaacctcaaaagtagggaagctgacagtgcagccttcagtctgtggcaaaaggcctgagagcccctggcaaaccactggtgtaagttcaagagtccaaaagatgaagaacttggagtctgatgtttgagggcaggaagcatccagcatgggagaaagatgaaggctcagcaagtctagtacttccacactcttatttctgcctgctttattctagctgagctggcagctgattagatggtgaccacccagtttgagggtgggtctacctctcccagttcactggcttaaatgttaatctcctttggcaacaccctcgcagacacacccagaaacaataatttgtagccttcaatccaatcaagttgataatattaaccatcacaggaaggtactagtatcatatgtttaacagtagaaaccaagacaaatgcagctaggaagtgggagaactgggatcagatgcaggcagtctgattctaaatcagttgctgttacccactctgacaacagtaagtgagtagcctgctcagtcaagtactatattagtagggccctttacagacatatttatttctcacagtcactcaatgagacggctcttccagtcttacaatggagaaagtgaggctcagagactttaagtaacttaccttagacgactttactagtaagtataagaatcattatttggactaaagtctttctgaatcctcagcttgtatttttttccagtgttctgtgctgcctttttatctactagtgttttacatcaattttgaatctctttactaactggttaggttgatttttgccttttttttttaggttattctatatttgtcgttaagggtgatctgccagattgcgaagctgaccaactcctgcagatgattagggtccaacagatgcatcgaccaaaacttattggagaagaattagcacaactaaaagagcaaaggtaaaaatgaggcctgcagtatggaatatatggtagtatttcattatgagaattaaattttcatgcttagattgaatatgtggtccttgtgttgttggcgactctattttggaccttatattttagtgaagtttattagtttaaacttgaatcaactctttgaaatacttaaatatattaacttagttagctggtatggtatattcctagcacttcgggaggctgaggcaggctgattgcttcaacccaggagttcgagaccagcctgggcaacatggcaaaacctcatctctacaaatagtacaaaaattagccagatgtggtggtgtatgcctatagtcccagctacttgggaggcagaggaagaaggatcacctgaaactggggaggtagagactacagtgagccataatcacactaccgcactccagcctggtcgagagagtcagaccctgtctcaaaaaaaaaaaaaaaaagaaacggaaaaaaaaaacttagttggattcaaattgcaacacaatcattatattactagagcttatttgccagaaaacattttaagttttgacttacttaaagcctttacattacaaatgcctttatgttatgtctaaaatagaagattggttgcagttattaccagtgcttttgttctttagagtccataaaacagacctggaacgagtgttagaagcaaatgatggctcaggaatgttagacgaagatgaggaggatttgcagagggctctggcactaagtcgccaagaaattgacatggaagatgaggaagcagatctccgcagggctattcagctaagtatgcaaggtaaagacattctgatgtgtgttgtattcattgctgaagaattgattccaattattcttagatttcatggaagttaatgtactcttagaggtgttttgacaattactgcagaagcaatagctatatagtgggctttccctttagatttcttataatggaaatcactttttacaacctatattttattaggagtagttatatttttactcctggttattttatttggtttcaacactgtactaacacaatagtaaattgtggttttaatctttgtgggtatcagttgacccttatccaaatcagctgttacataaatatgtgccattagacactatggaagggcctggacagggaatataaactgattttacaaaaacccaacatttattggctatgcaacttaaaccgtaagcccactttggtgggcccagttttttagtgatataaactatcaatagagaaaagcgaaaacatatcccctagacaatctaggcaaagaaaaatgttaagacatagctcaaagtagcttaattaaaagtttgaagtgggttttttgttttatttttttctaactcatatgtatttgcttctactttctaatgaaattatttatcagttgatttccttagatatctaaataaaattgaaatttcattaatgggaagattatttttatcctgaacttttcttgcctctatgcatgcctctgagtactccatatggtgtgcaatcccatttttgattaatagagtcctgctggattagcagggacagaaatcagctttagatttctttcttttttttttttctttctttttttttttttttttttttgagtcagagtctcactgtcgcccagcctggagtgcagtgatcttggctcactgcaacccctgcctccgaggttcaagcgattctcctgcctcagcctcctgagtagctgggactacaggcgcctaccaccacgcccagctaattttttgtacttttagtagagatagggttttgcccttttggccaggctggtcttgaactcctgacctcaggtgatccacctgccttggcctcccaaagtgctgggattacatgtgtgagccaccacgcccagccagaagagtagaatattcttaaagagaaaacgttttaaaggcttactcaaatgagtataaacaaacatattgttgcttgaattggtaaatacagtgattggtttttgttgtgttgtgttttgttttcaggtagttccagaaacatatctcaagatatgacacagacatcaggtacaaatcttacttcagaagagcttcggaagagacgagaagcctactttgaaaagtaaagtagttggtacaagttaaagtagcatgtttaatatttgctttggctattttgtctatttgtaaatggttactgcctgaatcctgtgaatatttgaatgtattttttaaaaatttacagcaaataggacgggcacggtggcttacgcctgtgatgctagcagtttgggaggccaaggcgggcagattgcctgaggtcaggagttcgagaccagcctgggcaacacagtgaaaccccatctctactaaaaatacaaaagaatcagctgggcatggaagcgtgcgcctgtagtcccagctgcttgggaggctgagccaggagaattgcttgaacccgggacgtggaggttgcagtgagccgagatcgcaccactgccctccagactgggtgacagagtgagactccgtctccaaaaatatatgtatatatatataaataaaaataaaaatttacggcaaataacatgaaacaaaaaaaccttgccccaatactggataaattttttaaactgagtgaaggaaaccttataaaatttcatttattaaaagaaaaatgaaattaggacaagacaagaagaatgccaattgatcctttggatgtacttcttgcttacctgattaaccctgcaaaattcctctaccaatcagtacgaaaaacagctttggaggtatgggagcgcattcccaaatagacgtggtagttcatttagctgctcatggccgcttcaggcagtcctgtaagcctgttagcatcaggggaatggatgcaaaccataaatctggatcaactcctaaaaccttaccttgtgcccagccttgtaagtgcttgctaaataggaattccaccatatgaaaatacattcttttcaagtaactatcattcagacttttgtcccccactttttttttttaaagaaaaataaaaggctgggcacggtggcttacgtctgtaatcccaccattttaggaggccaaggcaggtggatcacctgaggtcaggaattcaagaccagcctgaccaacatggtgaaacctcatctctactaaaaatacaaaaattagccgggcatggtggtgggtgcctgtaatcccagctacttgggaggctcagacaggagaatcgcttgaatctgggaggcagaagttgcagtgagctgagataacgccattgcactccagcctgggggacaagagcgagacttcgtctcaaaaaaaaagagaaagaaaacttcatgttaaagattacaagataaataatcagacccactgatcctaggtcagaaaacagagtcatagctcaatctgacttactatttgctgtatttcatccattctgagatgcacatagtttcacatttcaatgtctctgaaattgagaagcatcttacagtcataattgacagtatattagcagcacctataaatattggctcattttacatttgatggtataatgaagaaaatatttacctttttttctgttttgtttttaagtcacaactcagaagtagatgaaggaaaattctgatcagctgacatcctcttaatgtgagatatttctagtctttattcagtatagattaatggctaattatatgttaaatttcaaagtagtgcttattagtgctttttacttttaagtttcaaaattaacttttttattataataaactccaaatttatacaaaagtagaaaaactagcatactcctgtttatgacccagattcaacaaatactagcacacggccaatcttgcttttttttttttttttttttgagatggagtcttgctctgttgcccaggctggagtgcaatggcacaatttctgctcactgcaacctctgcctcctgagttcaagcgattctcccacttcagcctcccaagtagctgggattacaggtacacaccaccatgcctggctaattcttgtatttttagtagacacgggatttcaccatgtcgtccaggctggccttaaactcctgacctcaagtgatccacctgcctcggcctcccagagtgctgggattacaggcatgagccactgagcccggcccaatctcgttttataatactcccatctcccattctttccactgtcccacctgcaagtttggattattttgtaacaaatctcaatcatcatattattctataaccattttaatatgtgtctctaaaatatattagctttatttttaacatagttaaatgctattgtcataaaataataatcataataattaattgtaattctatatcatcaattatctagttaatgtaaaaaataaatctaaggccaggcgcggtggctcacacctgtaatcccagcactttgggaggctgaggtgggcagatcacctgagatcaggagttcaagaccagcctgaccaacatggagaaaccccatctctactaaaaatacaaaaaattagccaggcgtggtggcgcatgcttgtaatcccagctacttgagaggctgaggcaggagaatcacttgaacccgggaggcgaggttgcggtgagccgagatcgtgccattgcactctagcctgggcaaaaagagtgaaactccatctcaaataaataaataaataaataataaaaaataacttaaatctacttaattagaaaaactaacattctaaaaattttattttaagaaatatcaaaattggctgggcacggtggctcacgcctctaatccctgcactttggaaggctgaggtgggcggatcacctgaggtcaggagggtcaggagtacaagaccagcctggccaacatggcgaaaccctgtctccactaaaaatacaaaaattagccaggcatgatgatgggcacctgtaatcccagctactcaggaggctgagacagaagaatcgcttgaacccaggaggtagaggttgcagtgagctgagatcaccccactgcactccagcctgggtgacagagtgaaactccgcctcaaaaaaaaaaaaaagagaaaagaaatatagaaattaaagcatacatggccaggcgtagtggctcatgtctgtaatcccagcactttgggaggctgaggcaggcagatcacttgaggccatgagttcaagaccaacctggccaacatggcgaaagcctgtctctactaaaaatacaaaaaaattagttgggcatggtggtgcacacctgtaatcacagctactttggaggctgaggcaggagaatcgtttgaacccagaggtggaggttgcagtgagccgagattgtgccactgcactctatcctgggtgacagagcgagatactgtctcaaaaagaaaaaaaaaaggctgggcgcggtagttcatgcctgcaatcccagcactttgggaggccgaggcaggcagattacgaagtcaggagatggagaccatcctggctaatacagtgaaaccccgtctctactaaaaaatacacaaaaattagctgggtgtggtggcaggcacctgtagtcccagctactctggaggctgaggcaggagaatggcatgaacccgggaggtggagcttgcagtgagcagagatcacaccactgcactccagtctgggcgacagagcgaggctctgtctcaaaaaaaaaaaagaaagcatactctcacctccttcagtgactgatgttagtattttggcacattctttttctgtgacatatacacacttaccttgtaagtgttgtactcatttcctatgacagtaaatagtctttgtaacaggctgcatgatatttcataaaatgaatggatgtggcataatttatatgtgagccttttgaattctgctattataattaatattgcaatgaacaattcttatattgcctctacacctcaaatgtcttatcatttcttctagtttttctgaggatgtcagattattgggttaaaggatatgaacatttttaaggccttggaacagatttctaaattgctttccagaataattcccatgtgatactttcaccatgtttatttcagacttttttttttttttttttttgagacgaaatctcactctgtcacccaggctggagtgtagtggcatgatctcggctcactgcaacctccgcctcctgagtttaagcgattattctgcctcagcctcccaagtagctgcggttacaggcaagtgcctccatgcctggctaatttttgtgtcttttgtagacatggggtttcaccatgttgcccaggctggtttcgaactcctgagctcaggcaatctgcctacctcggcctcccaaagttctgggattacaggcgtgcaccaccgcgcccagccatcagagtcttttttgtcaaaataaaatggtctaaagacatacatcatagagaaactataatacaaaatttacaggtatatctaagaaaagaaaagtatatttaaagcataaaaataaactgctcttttacttaaaattttttaaaaactggattaaaaatatgaaacttccaacaaattgagcttttttttttttttttttcttttttgagacgaggtctcgcttttgtcacccagtctggagtgcagtggcgcgatctcggctcactgcaacctccacctccctggttcaagcaattcccctgcctcagcctcccaagtagctgggattacaggcgcatgccaccacgtcgggctaatttttttgtatttttagtagagagggggtttcaccatgttggccagactggtctcgaactcctgatctcaggcaatctgccagcctgggtctcccaacatgctgggattacaggcatgagccactgcactcggcctgaactttttatagtagtaacgataattcagtaatgtccaataatgactaagtaagttataacaagtacaatgtcagcaataactagtgctttttagtaaacagggtcaggcaaccttgtacccttttaaaaatgttcgaatatcgatatacctccttcctacttggtggaggattgattgaggaggaaagtgtgcagtgatggttaccagcttcagcctcttggcttgactttgcaaatactggtgagaatttggaaagagcttgagaatatcttacatagtcacatgttgctgagaagagttaagaactaacttcttgatgttcatttttaacaatggcttgcattcaaaaccttgtagagctcattagtaggagctaagaagctaatatttgcctttcactaaaattcctgattacttagcctaggtagttcgttgtctctctaggttctgtctttgggagcttgggtctaaggttatcaagctaactctttcttccctctcacccttcccaaattgaccctggtgctgatttgttattcatacgattttctagtttttcttttccctttttgagtatttgaagcttcatactgaatatagtaatcatagtattcatgcataaagaaaatcataaagtaattgcataaatgcataaagtaatcatagttttcatgcattaaaaaaactagttttggctgggcgctatggctcacgcttgtaatcccagcactttcggaggccaaggcaggcgaatcatctgaggtcaggagttcgagactagcctggccaacatggcgaaacctcttctctactaaaaatacaaaaaaattagccgagtatggtggcgggcgcctgtaatcctagctatttggcaggctgaggcaggagaatcacttgaacctgggaggcagaggttgcagtgagccgaggttgtgccattgcactacagcctaggcgacaagagcaagactccatctcaaaaaaaaaaaaaaaaaaaaaaaaactccctattacagattcataatttatgagtcattaaataatattttcaagccatgacattttttccagcagtagtctctaaatctgttttaccatcataaaaccccaagcaaaactctactacatcagctgtgtcactgtaaaacctgccttaactcacagaagcatgaaattaagcaatgtgtgtgaaactattttataaactgtaaagtattccatacatacatgttggcagttattaatgtcttctctaggtgtggctttgaaatggatgcagatgctttctgttacaaaaaacataagttgcaaatgttctataacaaggagagacacaaatatcttcatggacatggattgctatgagtgtttgattgcctaatacttgagccaccacttcagtgatatggtataatttatcaaacagtgttgagaaacagaaactactggggatgttttaaagaggaaaatacttaatatagaaattaggggtttacataatcttaagaaaggatgaaggtgcagctcttagccaggcctccacagtaccacaaaccaacttgcaggaagagctgtaaccactgccccagttgggacaatgggtaatgaggatattaaatttaagaacatactgctatagcaatgatccttggcatagaaagctgccaccacaattgcctagagatgggaacatgaagtctggcccccattgcaacagcagtgaagcagaattttgggactggcatctcccaaatggctttgcttgccaccagagaacaaccaaagtggagggagatggctaggcctcatttctgcctattttattttattttttgagacggagtcttgtctgtcgcccaggctggagtgcagtagtgtgatctcggctcactgcagcctccgcctcccagcttcaaacaattctcctgcctcagcctcctgagtagctgggattacaggcacccgccactgtgcccagccaattttcttatttttagtagaggtggggttttgccacgttggccaggctggtcttgaactcctgacctcaggtgatctgcccgcctcagcctcccaaagtgttgtgattacaggtatgagccaccatgcctggcccatttctcccttttttttttttttttttttttgaggtggagtctcactctgttgcccagactggagtgcagtggtgcaatcttggcgcattgcaacctctgcctcccagtttcaagcaattcttctgcttcagcctcctgagtagctgggactacaggtgtgtagcaccacacctggctaatttttgtttttgttttgttttttttgagacagagtctcactctgtcacccaggctggagtgtagtggcatgatctgggctcactacaacctccgcctcccgggttcaagcaattctcctgcctcagcctccagagtagctgggattacaggtgtgcgccaacacacctggctaatttttttgtatttttaatagagatggggtttcaccatgttggccaggctggtctcgaactcctgacctcgtgatccgcccgcctcggcctcccaaagtgctgggattacaggcatgagccaccgtgcccagacaaggtttgtatttttagtagagacagttttgccatgttggccaggctggtcttgaactcctcacctcaggtgatccgcctgccttggcctcccaaagtgctgggattacaggcgcaagccactgtgcctgacccgtttctgctttttaaagctcatgtgagcacttaatttgtaaccagaatcctacttgtaaaataatctaagacatgtagcttttagctttgtaacctctataatattgatggcacagtgggagtggatgctgagtaccacttgaacatgttccacctcagtgtcttcacagctggaaggtgtctacattgtttcaaggtggacaattgatttacttctcatttttcataaactaaaagtagaataaaggctattcctctaaaattgctatctcacctgtcactcccttgcattctcacataccttcttgagtggaggggcagagggcatggagtgatagcagatgtgccaggaattctccataactcagtccgtccctcttgtgctatgttgcagcatcaggatttgctaatgggaggatactgcccttacgtgcatcattagccatgcacactaaggtcttacacctacacacaggtcagtattctggctcagagaccaacagggagaaattgcagttctcattagttgaactttctttattgttcacagttttaaaacacaaaattgagaggaactctataaaaaatgtgccattctattaataattgttgctggtaatttaaaaatccttgttccttttcaaattcttatataccttttttttttaaacacttgatcttagccaaaagaccgagaagcaatcttttttttttttttttttttttttaacctatagcttctcactgagattgtcagctgtttgtaagttttggtttttggttttctgtgtttgtatttacatatatgaaatacagattgagtatcccttatccaaaatgcttaagactggaagtgttttagatttggggttttttaggatttgtgaatatttgcactatacttaccagttaagcattccaaatccaaaatttcaaatctgaagtgttccactgagcacctcttttgagtatcatgttggtgctcaaaaagtttctgattttggagcatttggatttctgattctcggatttaggatgcttgacctgtaatttcagatttacataaaagcagaaatagtacacagagctccttatatccttcacccagattccccaattattggcctttctgaaccatttgggaataatatgcagatatgattttccattatgtctcagttgttcagtgtatattttctaagtacaagaatatattcctacatatttacatgataaccgtcatgtttaaacattttaaaatggggatttgtattacattgtttctctttttgaaaaaattacagaggagcttaatgcaatcagtattacttaaaatctgataatgtgtgttaaatagtagttttcatttatttcatttatcaggtgttcagtgaatgcttactatgtaacagcacagttatcagcactggggaaatagatgagtaagataagatttgcactttcattagcttacatgccataaagagggaaataaagagaacaccagatgatgataagtttatgctgagaattaaaatgaagtgatgaaataatgggaatgtcaggtggctacttttggtgggatggtcaggaaaggcatctctggggagataaattttaagctcagacctgagtgaaaagaatgagccagccatggaaacattatgttaactcacatggtagtttgaaatgctttatctgatcaaaggtacttatttttggtgactttcaacaatattaagggtctataaaccaacactcatttgcataagaataactaccagtgaatctttttgtatgataggttttttgtttgttgtttttttgagacagagtctcgctctgtcgcccaggctggagtgcagtggcgcgatcttggctcactgcaacctctacctccccggttcaagtgattctcctgcctcagcctcccaaagtagctgggattacaggtgcctgccaccacgcctggctaatttttgtatttttagtagagatggggtttcaccgtgttgtccaggctcgtgtcaaacttctgacctcaagccatccacccgcctcggcctcccaaagtgctgggattacaggtgtgagccaccactcctggccatgataggttattttgtgatgaaaatacctacctcttaatttgtctgataaatttaaattttatgtctagatttcctaagatcagcacttccatattttaaagtaatctgtatcagactaactgctcttgcattcttttaataccagtgactactttgattcgtgaaacaatgtattttccttatgaatagtttttctcatggtgtatttattcttttaagttttgttttttaaatatacttcacttttgaatgtttcagacagcagcaaaagcagcaacagcagcagcagcagcagcagcagggggacctatcaggacagagttcacatccatgtgaaaggccagccaccagttcaggagcacttgggagtgatctaggtaaggcctgctcaccattcatcatgttcgctaccttcacactttatctgacatacgagctccatgtgatttttgctttacattattcttcattccctctttaatcatattaagaatcttaagtaaatttgtaatctactaaatttccctggattaaggagcagttaccaaaagaaaaaaaaaaaaaaaagctagatgtggtggctcacatctgtaatcccagcactttgggaaaccaaggcaggagaggattgctagaacatttaatgaatactttaacataataatttaaacttcacagtaatttgtacagtctccaaaaattccttagacatcatggatatttttctttttttgagatggagtcttgctctgtcacccaggctggagtgcagtgtcgcgatctcggctcactgcaagctctgcttcctgggttcatggcattctcctgcctcagcctcctgagtagctgggactacaggcgcccgccacatcgcctggctaattttttgtatttttagtagagacagggtttcaccatgttagccaggatggtctcaatctcctgacctcatgatccgcccgcctcggcctcccaaagtgctgggattacaggcgtgagccatcacgtccggccagaaatcatgaatattagtaggtgaaaaataaacacattttaccacctggaaaatgaaaaatacttgagtataatctaaataacaatgggaagtgcagagttactttccaggtctcggtttaaatatgtcttaaactttggccaattagtagtagaagttgagagaaaaagtaactatctgacaaagaaattataagcagaatatataaagaactcttaaaactgaataatcagaaaacaactcaataaaaaggtgaaggatttgaaaagatatttcaccaaataagacatagggatgacaaataagcacatgaaaagactctcagcatcactagtcacagggaaatgcacgataaaaccacagtgagacaccatggcacccctgtaggtatggctttaatgaagaaataaaactgacaataccaagtgttggcaaggatccaagcagctgagactcatatactgttaatgggaatgtaaaagtgtacagctttggaaaacagtttggcatttttttgataaatgtatacttagccatgtgatccagcagtcccaatcatgtatatataaccaaaagaaaagaaaacttaggttcacataaaaacttatatcaaatgcttatagctgaccaggcatggtggcccatgcctataatcccagcactttgggaggccgaggttggcagatacctgaagtcaagtgttcgagaccagcctggccaacatggcaaaaccctgtctctacttaaaatacaaaaattagccaggcgtgatggcaggcacctgtagtccagctattcaggaggctgaggcaggagaatcacgtgaacccgggaggcagaggttgcagtgagccgagatcgtgccactatactccagcctgggtgacagagcaaaactctgtctcaaaaaaaaaaaaaaaaaaaagggctggacacggtggcttacgcctgttatcccggcactttgggaggccaaggctgatggatcacctgaggtcaggagttcaagaccagcctggccaacatggtgaaaccccatctctactaaaaatacaaaaatttgctgggcatggtggtgggcacctgtaatcccaggaggctgaggcaggagaatcacttgaacccgggaggcggagattgcagtgagccaagattgtgccattgaactccagcctgggtgacaagaccaaaactccttctcaaaaaaaaaaaagattatagcatctttattcatcattgcccaaaattacaaactgcctaaatgtagaccttcatttagttaatgaatgcacaaactgtggtatatccaaacaattgaataaaaaaaggaatgaactggtacttttttctattcctcctgtttaagtacagccaaaacacctcaacatttgtataaaacatgagctgggctgggtgcggtggctcacacgtgtaatcccagcactttgggaggctgaggcgggtggatcacctaaggttgggagttcaagaccggtctgaccaacatggagaaaccctgtctcaactaaaaatacaagattagtcgggcatggtggcgcatgcctgtaatcccagcttcttgggaggctgaggcaggagaattgcttgatcccgggaagcgaaggttgcagtaagctgagattgcaccattgcactccagcctgggcaacaagagcaaaactctgtctcaaaaagaaaaaaaaaaccattcagctgaatctcaaaggcagagagaagacagactggctagggaccttggaaccagaggagcagtgtggtggggagtggactggattttctttttgcctcatttatcctggacttggtgctggagaagctatgggttcagaccaagagaaaaccccatgaaaagcctgctctctctagccaaaagaggcaacctagcaagataaaaacctttagataataagcacttgactccagtcaaacaaaacagaataaactggccccattcacccctgtcagcaaaggccaagtgggagccaagatatgtaccccaacctggaagtcataaggtacacttctcccctttcccagccaaggtggtgttagagaaggctgactggggagctgggattctcattccctccaggaggtgataacactcctttcacatggtgtcagtggtcacagggaggctgaacttccacccagtaatacataggcatctctctggctcctatatgggtgatgttggagaagaggccgagtagagaatccagactgttgctgacacccagcagtaacaaggacacctccacaatgtccgtggaggccatgtggagatcagtaacaaggcactgctctccctcccagtcagagagatgtcagtggaggactagggggctagaactcccatgtgcgttcagcagtaatccccatgaccgccactccttgacatcacaggccttgaagaaacctggactttcactcccctctggttgtagcgaggtggcactcccttttccctgttgccagtgctgtgtcagtggaggcttgctaaattggaagatgtaaataagattcacattctcataacataataccccaaattttcaggatttaattgaaaatcactaagctgggcatggtggctcacacctgtaatcccagcactttgggaggccaaggtgggccaaacacttaaggtcaggaattcaagaccagcctggccagcatggtgaaaccctgtctctactaaaaatacaaaaattagctgggcgtggtggcacatgcctgtaatcccagctactgggaaggctaaggcaggaaaatcactggaacctgggagacggaggttgcagtgatccaagatcgcactagtgtactgcagcctgggcaacagagcaagactccatctaaatttgtgtcaggattcccagaaggagatgagaaagggtggggctgaaaaaaattgaggaagaagtcatggctgaaaatttcccaaatttggcaaaagtcagaaacctacagattgaaaaagctgaatgaagctcaaatatgataaactcaaagaagttcacacagagacacatcacagtcagatttctgaacactgcagacaaaaaatgaagatctcgaaattagcaagaaatgaccttacctaagcaatttgaatgacagcagatttcccatcagagatcataaaggccagaaggaaggggtacatacaacattttttctagtgctgaaagacaaaaactctaggctgggcacggtggcacacacctgtaatcccagcacttttggaggctgaggcaggcagatcacctgaagtcaggagttcgagaccagcctggccaacatggggaaaccctgtctctactaaaaatacaaaaattagccaggtgtggtggcacgcacctataatcctagctacttgggaggctgaggcaggggaatcgcttgaacctgggaggcgacggttgcagtgagccaaggtcgcgccactgcactccagcctgggcagttgagcgagactccatctcaaaaaaaaaaaaattatccaggcttggtggtgggcgcctatagtcccagctacttgggaggctgaggcaagagaattggttgaacccaggaggtggaggttgcagtgagccaagctcatgccactgtactccagcctgggtgacagagcgagaccttgtctcaaaaaaaaaaaaaaaaaaaaaaaacaagaaaaaaactctaaacccagagttacatatccagtgaaatatccttcaggagtgaagggaaaattaacgatttgtcttcaggagacctaccctaaaagaatggctaaaggaatttctctaaacagaaaagaaatgataaaagaagtaattttggaacatcaggaaggaagaaagaacaataaaaagagtaaaatatgggtaaacacaatagactttcccctccttttgaattttctaaattgtatgatggttgaagcaagaattatagcactgatttggttttcagtatatatattggaaatatttaaggcattatgttacagatgaaggagggtcaaaggatataaagggaggtaacctttctatatttcttttgtactgatgcaggcactttggaaaataatttcactatttgtttaaaaactgaacataccctgaccatatgacatagcatctatactcctgggcatttatcccagagaaacagaaatttatttattttttttttagtattacactccgtaagtgctgtaatactagcacttagggaggctgaggcaagcagattgcttgagcccaggagttcaagaccagcctgggcaatgctgcacagtcaaaaaagaaaaacaaacatttagaaaactattttaaaagtctttaattgctgaatgcctctttggctaatatttggaagatcattattattatttttcttttttaggcagagtcttgctctgtcactgaggctggagtgcagtggcgccatctcggcttactgcaacctctgcctcccgggttcacgccattctcctgcctcagcctcccgagtagctgggactacaggcgtgtgccaccatgcccggctaattttttgtgtttttagtagagatggggtttcactatgttagtcaggatggtctccatctcctaacctcgtgatccgcccacctcggcttcccaaaatgctgggattacaggcgtgagccactgtgcccagcctggaagatcattatttagtcctacaactgacacattgttccactgacgcaattgcccaggctggtcttgaactcctgggctcaagcaatctgcctgcctcggcctccctaagtgctagtattacaggcttgagccactgtgcccagccaaaaatagaaatttatattctcacaaaaacatgtacatgaatgtttatagcagctttacttgtcataatcaaaaactggaaacaaccaaaatgtcctacagtgaaacaaactgtagtacatccatagcatgtaatactctactgtcaggattaaaaagaaacccactgttggcacaggcagcaccgtggctggatctcaggggcattatgctgagtgcaaaaaagcctcaaagggtcttacactgtatgattccacttgttcaactaaaaatgacagctgtatagagatagagaacatattagtggtttccactagttagagaaagtgggtaaaagataggtgggtgggaatataaatcgatagcagggagatctttgtggtattataacacttctatgtcttgattgtagtggtggtggttacatgaatacacgtgtgataaaatgccatgtagaactacatataacgttgtgccaatgtcaatatctaggttttagtttgatctttagttacataagatgtaactattgggtgaaattgggcaaaagagtacacgaaacctctcttaaatatctttacaacttcctttgaattgacagtttttcaaaatagaaagttgggtttttgtaaatacatgaattgttgatatacacaacaaatctcaaatgcattatgctacgtgaaagaagccatattcaaaaggctacatacctactgatgccttttatatgacgtgcaggaaaagataaaactgtaggacagagaatatactggtggctatctgggattaggaaatggggatcgaccacaaaggggcagcatgggggaattttctggggcaatggaatggttgtgtatcttgatggtgtatttgtcaaaatatatagaactataaaagtaaattttgctttatatgtattaaatcaaaaaaagaaactcgtgctcaaatagaaatacattttctgagaacttgccttttgatgactttgagaattttctggaaattttaaagaaatgtggttttgtttcccaacaggtgatgctatgagtgaagaagacatgcttcaggcagctgtgaccatgtctttagaaactgtcagaaatgatttgaaaacagaaggaaaaaaataatacctttaaaaaataatttagatattcatactttccaacattatcctgtgtgattacagcatagggtccactttggtaatgtgtcaaagagatgaggaaataagacttttagcggtttgcaaacaaaatgatgggaaagtggaacaatgcgtcggttgtaggactaaataatgatcttccaaatattagccaaagaggcattcagcaattaaagacatttaaaatagttttctaaatgtttctttttcttttttgagtgtgcaatatgtaacatgtctaaagttagggcatttttcttggatctttttgcagactagctaattagctctcgcctcaggctttttccatatagtttgttttctttttctgtcttgtaggtaagttggctcacatcatgtaatagtggctttcatttcttattaaccaaattaacctttcaggaaagtatctctactttcctgatgttgataatagtaatggttctagaaggatgaacagttctcccttcaactgtataccgtgtgctccagtgttttcttgtgttgttttctctgatcacaacttttctgctacctggttttcattattttcccacaattcttttgaaagatggtaatcttttctgaggtttagcgttttaagccctacgatgggatcattatttcatgactggtgcgttcctaaactctgaaatcagccttgcacaagtacttgagaataaatgagcattttttaaaatgtgtgagcatgtgctttcccagatgctttatgaatgtcttttcacttatatcaaaaccttacagctttgttgcaaccccttcttcctgcgccttattttttcctttcttctccaattgagaaaactaggagaagcatagtatgcaggcaagtctccttctgttagaagactaaacatacgtacccaccatgaatgtatgatacatgaaatttggccttcaattttaatagcagttttattttattttttctcctatgactggagctttgtgttctctttacagttgagtcatggaatgtaggtgtctgcttcacatcttttagtaggtatagcttgtcaaagatggtgatctggaacatgaaaataatttactaatgaaaatatgtttaaatttatactgtgatttgacacttgcatcatgtttagatagcttaagaacaatggaagtcacagtacttagtggatctataaataagaaagtccatagttttgataaatattctctttaattgagatgtacagagagtttcttgctgggtcaataggatagtatcattttggtgaaaaccatgtctctgaaattgatgttttagtttcagtgttccctatccctcattctccatctccttttgaagctcttttgaatgttgaattgttcataagctaaaatccaagaaatttcagctgacaacttcgaaaattataatatggtatattgccctcctggtgtgtggctgcacacattttatcagggaaagttttttgatctaggatttattgctaactaactgaaaagagaagaaaaaatatcttttatttatgattataaaatagctttttcttcgatataacagattttttaagtcattattttgtgccaatcagttttctgaagtttcccttacacaaaaggatagctttattttaaaatctaaagtttcttttaatagttaaaaatgtttcagaagaattataaaactttaaaactgcaagggatgttggagtttagtactactccctcaagatttaaaaagctaaatattttaagactgaacatttatgttaattattaccagtgtgtttgtcatattttccatggatatttgttcattacctttttccattgaaaagttacattaaacttttcatacacttgaattgatgagctacctaatataaaaatgagaaaaccaatatgcattttaaagttttaactttagagtttataaagttcatatataccctagttaaagcacttaagaaaatatggcatgtttgacttttagttcctagagagtttttgtttttgtttttgtttttttttgagacggagtcttgctatgtctcccaggctggagggcagtggcatgatctcggctcactacaacttccacctcccgggttcaagcaattctcctgcctcagcctccagagtagctgggattacaggcgcccaccaccacacccggcagatttttgtatttttggtagagacgcggtttcatcatgtttggccaggctggtctcgaactcctgacctcaggtgatccgcctgccttggcctcccaaagtgttgggattacaggcatgagccactgcgcctggccagctagagagtttttaaagcagagctgagcacacactggatgcgtttgaatgtgtttgtgtagtttgttgtgaaattgttacatttagcaggcagatccagaagcactagtgaactgtcatcttggtggggttggcttaaatttaattgactgtttagattccatttcttaattgattggccagtatgaaaagatgccagtgcaagtaaccatagtatcaaaaaagttaaaaattattcaaagctatagtttatacatcaggtactgccatttactgtaaaccacctgcaagaaagtcaggaacaactaaattcacaagaactgtcctgctaagaagtgtattaaagatttccattttgttttactaattgggaacatcttaatgtttaatatttaaactattggtatcatttttctaatgtataatttgtattactgggatcaagtatgtacagtggtgatgctagtagaagtttaagccttggaaataccactttcatattttcagatgtcatggatttaatgagtaatttatgtttttaaaattcagaatagttaatctctgatctaaaaccatcaatctatgttttttacggtaatcatgtaaatatttcagtaatataaactgtttgaaaaggctgctgcaggtaaactctatactaggatcttggccaaataatttacaattcacagaatattttatttaaggtggtgctttttttttttgtccttaaaacttgatttttcttaactttattcatgatgccaaagtaaatgaggaaaaaaactcaaaaccagttgagtatcattgcagacaaaactaccagtagtccatattgtttaatattaagttgaataaaataaattttatttcagtcagagcctaaatcacattttgattgtctgaatttttgatactatttttaaaatcatgctagtggcggctgggcgtggtagctcacgcctgtaatcccagcattttgggaggccgaagtgggtggatcacgaggtcgggagttcgagaccagcttggccaaaatggtgaaaccccatctgtactaaaaactacaaaaattagctgggcgcggtggcaggtgcctgtaatcccagctacctgggagtctgaggcaggagaattgcttgaaccctggcgacagaggatgcagtgagccaagatggtgccactgtactccagactgggcgacagagtgagactctgtctcaaaaaaaaaaaaaaaatcatgctagtgccaagagctactaaattcttaaaaccggcccattggacctgtacagataaaaaatagattcagtgcataatcaaaatatgataattttaaaatcttaagtagaaaaataaatcttgatgttttaaattcttacgaggattcaatagttaatattgatgatctcccggctgggtgcagtggctcacgcctgtaatcccagcagttctggaggctgaggtgggcgaatcacttcaggccaggagttcaagaccagtctgggcaacatggtgaaacctcgtttctactaaaaatacaaaaattagccgggcgtggttgcacacacttgtaatcccagctactcaggaggctaagaatcgcatgagcctaggaggcagaggttgcagagtgccaagggctcaccactgcattccagcctgcccaacagagtgagacactgtttctgaaaaaaaaaaatatatatatatatatatatatgtgtgtatatatatatgtatatatatatgacttcctattaaaaactttatcccagtcgggggcagtggctcacgcctgtaatcccaacactttgggaggctgaggcaggtggatcacctgaagtccggagtttgagaccagcctggccaacatggtgaaaccccatctctactaaaaatacaaaacttaagccaggtatggtggcgggcacctgtaatcccagttacttgggaggctgaggcaggagaatcgtttaaacccaggaggtggaggttgcagtgagctgagatcgtgccattgcactctagcctgggcaacaagagtaaaactccatcttaaaggtttgtttgtttttttttaatccggaaacgaagaggcgttgggccgctattttctttttctttctttctttctttctttttttttttttctgagacggagtctagctctgctgcccaggctggagtacaatgacacgatgttggctcactgcaacctccacctcctgggttcaagcgattctcctgcctcagcctcccaagtacctgggattacaggcacctgccactacacctggcgaatatttgttttttttagtagagacgggcttttaccatgttaggctggtctcaaactcctgacctcaggtgatctgcctgccttggcctcccaaagtgctgggattacaggtgcaggccaccacacccggccttgggccactgttttcaaagtgaattgtttgttgtatcgagtccttaagtatggatatatatgtgaccctaattaagaactaccagattggatcaactaatcatgtcagcaatgtaaataactttatttttcatattcaaaataaaaactttcttttatttctggcccctttataaccagcatctttttgctttaaaaaatgacctggctttgtatttttttagtcttaaacataataaaaatatttttgttctaatttgctttcatgagtgaagattattgacatcgttggtaaattctagaattttgattttgttttttaatttgaagaaaatctttgctattattattttttccaagtggtctggcattttaagaattagtgctaataacgtaacttctaaatttgtcgtaattggcatgtttaatagcatatcaaaaaacattttaagcctgtggattcatagacaaagcaatgagaaacattagtaaaatataaatggatattcctgatgcatttaggaagctctcaattgtctcttgcatagttcaaggaatgttttctgaatttttttaatgctttttttttttttgaaagaggaaaacatacatttttaaatgtgattatctaatttttacaacactgggctattaggaataactttttaaaaattactgttctgtataaatatttgaaattcaagtacagaaaatatctgaaacaaaaagcattgttgtttggccatgatacaagtgcactgtggcagtgccgcttgctcaggacccagccctgcagcccttctgtgtgtgctccctcgttaagttcatttgctgttattacacacacaggccttcctgtctggtcgttagaaaagccgggcttccaaagcactgttgaacacaggattctgttgttagtgtggatgttcaatgagttgtattttaaatatcaaagattattaaataaagataatgtttgcttttctatttccttttgaatttgtgtttattgttaattcatagctattcaaagtgtgattagagctgggcttggtggcttgcatctacagttccagctacccaggaggcagaagcaggaggattgcttgagcctaggagttcgaggctgcagtgagctatgatcctgccactgaattctagcctgggcgacaaaacaggaaaaaagtatggatggaggaccagcagcatctgtatcacctgtgagtctttcagaaatgcagagtttcaggctacactcggacctactgaatcagaacttgcactttttacaagatccccaggacactaaagtatagagtgaagcttgagaagcgctgttgtgtggattgttcttaaccagctgcagtgatgaatatgaataacgcaggccagcacagtccattgatattctattccagcttactgcctgccaaaaggtccattattactggatcctcagtcttttccaagagaagctaagaattccaaatttttatttgaaatatattttttaaatgtttgttcaactggcccagtgccagtggctcatgcctttaatcctagcactttgagaggccgaggtggaaggatcacttgaccccaggagtttgagaccagcctgggcaacataaagagaccccatctctattaaaaaaaaatagagacaatgctgccttaaaaaagtcaaataaatgtttgctcaactgatttttaatactgagggccaaacaaagcacatcaaatttttaagtgctgcttttcctcattttatccaactctggacaccagaatccaaatgtagtgattggaatccacctagactgattgaggaatatattgtcctcaaattttatgagggttgactattcattttaactttaattaggattgggcacaaattttgaaacataataacattacaggaccggggcccgatccagaccccaagagagggttcttggatcttgtgcaagaatgaattcagggcaagtccataaattgaaagctagttcattaagaaagtagaggaataaaagaatggctaccccataggtagagcagccctgagggctgctggttgccatgtccacccccgcgccccctccccccgctttgttgttgttgtttaagacagagcttcgctgtgtcatcaggctggagtgcagtggcatgatagctcactgcaacctctgcctcccgcgttcaagcaattctcctgcctcagcctcctgagtagctgggactacaggcgtgcaccaccacgcccagctaatttttgtatttttagtagagatgcggtttcaccatgttggccaggaaggtctcaatctcttgacttcgtgatccacccgccttggcctcccaaagtgctgggatgagccacctcgcctggctggttatttcttgatgatatgctaaacaaggggtggattattcatgcctgccctttttagaccatttagggtaacttcccggcattgccatggcatttgtcaactgtcatggtgccaatgggagtgtagcagtgaggaggaccagaggtcactttcatcaccattttggctttttcagccggcttctttactgcaacctgttttatcagcaaggtttttatgatctgtatcttgtgcagaccttctatctcatcctgtgacttagaatgccttaaccatctgggaatgcagcctagtaggtcttggcctcattttaccaaccccctattcaagatggagttgctctggttcaaatgcctctgatatttccctactcccttttataagaaaacccttaatcctaagggttgcagagggatgaagatccatcttctgtattcttcaggctgaataggggtgatgatattcctgcctatgagagtctcttgtattagggtagagaggagctcagtcagtcagtatggctccctatccttcctcccttccccagcccctgacaactaccattctactttgtctctatgattctaagtatctcctataagtggaatcattcagtatttgtagggtttttttgtgactagtgtatttcacttagcatgtcaaggttcatccatgttgtagcatacgtccaaattttcttctttttaaaaactgaataatattccattgtatgatatatgcacattttgcttattcatttatccatcaaagaaaaccagtagcttttttacataccggcagtaacctggttaaaaaaataagatggaaaataccaagcccgaaaatgtcaaattcttgaataccagacaggtactataatccaagctgagcagagaggaatggcccttgtctcagccctgagccacatgtcactacatgggccccaaggagctcttgtgcccagagtcctgctaaggctcgttcttcacccctctaaagtggctcaaactagcgtaggaggccaggagggagcagattctatgccacctccattgcttccgtgccttctccagatccattttttccaaaagctgtgtttgaattctgcacaggggcatctctgtctccaacactgaaacccc

(The sequence listing continues in the following parts.)

1. An oligomeric compound comprising a modified oligonucleotide consisting of 16-20 linked nucleosides, wherein:
each nucleoside of the modified oligonucleotide is either a sugar-modified nucleoside or a DNA nucleoside, provided that not more than 4 nucleosides are DNA nucleosides; and
the modified oligonucleotide comprises 1-4 blocks of phosphodiester linkages, wherein each block of phosphodiester linkages consists of a single phosphodiester linkage or of 2-4 contiguous phosphodiester linkages; and wherein each of the remaining internucleoside linkages is a phosphorothioate linkage.

2. The oligomeric compound of claim 1, wherein 4 nucleosides of the modified oligonucleotide are DNA nucleosides.

3. The oligomeric compound of claim 1, wherein 3 nucleosides of the modified oligonucleotide are DNA nucleosides.

4. The oligomeric compound of claim 1, wherein 2 nucleosides of the modified oligonucleotide are DNA nucleosides.

5. The oligomeric compound of claim 1, wherein 1 nucleoside of the modified oligonucleotide is a DNA nucleoside.

6. The oligomeric compound of claim 2, wherein the 4 DNA nucleotides of the modified oligonucleotide are non-contiguous.

7. The oligomeric compound of any of claims 1-6, wherein the 5′ terminal nucleoside of the modified oligonucleotide is a DNA nucleoside.

8. The oligomeric compound of any of claims 1-7, wherein the 3′ terminal nucleoside of the modified oligonucleotide is a DNA nucleoside.

9. The oligomeric compound of any of claims 1-8, wherein the 5′ penultimate nucleoside of the modified oligonucleotide is a DNA nucleoside.

10. The oligomeric compound of any of claims 1-9, wherein the 3′ penultimate nucleoside of the modified oligonucleotide is a DNA nucleoside.

11. The oligomeric compound of claim 1, wherein each nucleoside of the modified oligonucleotide is a sugar-modified nucleoside.

12. The oligomeric compound of any of claims 1-11, wherein at least one sugar-modified nucleoside of the modified oligonucleotide is a 2′-substituted nucleoside.

13. The oligomeric compound of any of claims 1-12, wherein at least one sugar-modified nucleoside of the modified oligonucleotide is a bicyclic nucleoside.

14. The oligomeric compound of any of claims 1-12, wherein each sugar-modified nucleoside of the modified oligonucleotide is either a 2′-substituted nucleoside or a bicyclic nucleoside.

15. The oligomeric compound of any of claims 1-11, wherein each sugar-modified nucleoside of the modified oligonucleotide is a 2′-substituted nucleoside.

16. The oligomeric compound of any of claims 1-11, wherein each sugar-modified nucleoside of the modified oligonucleotide is a bicyclic nucleoside.

17. The oligomeric compound of any of claims 12, 14, 15 wherein at least one 2′-substituted nucleoside is selected from a 2′-MOE nucleoside, a 2′-NMA nucleoside, and a 2′-OMe nucleoside.

18. The oligomeric compound of any of claims 12, 14, 15 wherein each 2′-substituted nucleoside is independently selected from a 2′-MOE nucleoside, a 2′-NMA nucleoside, and a 2′-OMe nucleoside.

19. The oligomeric compound of any of claims 12, 14, 15 wherein at least one 2′-substituted nucleoside is a 2′-MOE nucleoside.

20. The oligomeric compound of any of claims 12, 14, 15 wherein each 2′-substituted nucleoside is a 2′-MOE nucleoside.

21. The oligomeric compound of any of claims 12, 14, 15 wherein at least one 2′-substituted nucleoside is a 2′-NMA nucleoside.

22. The oligomeric compound of any of claims 12, 14, 15 wherein each 2′-substituted nucleoside is a 2′-NMA nucleoside.

23. The oligomeric compound of any of claims 13, 14, or 16-22, wherein at least one bicyclic nucleoside is selected from a cEt nucleoside, an LNA nucleoside, and an ENA nucleoside.

24. The oligomeric compound of any of claims 13, 14, or 16-22, wherein each bicyclic nucleoside is selected from: a cEt nucleoside, an LNA nucleoside, and an ENA nucleoside.

25. The oligomeric compound of claim 1, wherein the modified oligonucleotide has a sugar motif (5′ to 3′) selected from: eeeeeeeeeeeeeeeeeeee, eeeeeeeeeeeeeeeeeee, eeeeeeeeeeeeeeeeee, eeeeeeeeeeeeeeeee, eeeeeeeeeeeeeeee, nnnnnnnnnnnnnnnn, nnnnnnnnnnnnnnnnn, nnnnnnnnnnnnnnnnnn, nnnnnnnnnnnnnnnnnnn, nnnnnnnnnnnnnnnnnnnn, nennnnneneennnnnnn, nnnnnnnnnnnnenneen, nennnnneneenenneen, nnnnnnnnnnnnnnnnnne, nnnnnnnnnnnnnnnnnnd, nnnnnnnnnnnnnnnnnny, nnnnnnnnnnnnnnnnnndd, nnnnnnnnnnnnnnnnnned, nnnnnnnnnnnnnnnnnnde, nnnnnnnnnnnnnnnnnnee, eeeeeeeeeeeeeeeeeedd, eeeeeeeeeeeeeeeeeeed, eeeeeeeeeeeeeeeeeede, nnnnnnnnnnnnnnnnnnd, nnnnnnnnnnnnnnnnnne, eeeeeeeeeeeeeeeeeed, keekeekeekeekeeeek, keeekeeekeeekeeeek, keeeeekeeeeekeeeek, keeeeeeekeeeeeeeek, keeeeeeeeeeeeeeeek, eeekeekeekeekeekek, eeekeekeekeekeekee, eeeeeekeekeekeekee, eeeeeekeekeekeeeee, eeeeeekeeeeekeeeee, keekeekeekeeeeeeee, eeeeeeeekeekeekeek, keekeekeeeeeeeeeee, eeeeeeeeeeekeekeek, keekeeeeeeeeeeeeee, eeeeeeeeeeeeeekeek, keekeekeekeekeeek, keeekeeekeeekeeek, keeeekeeeeekeeeek, keeeeeeekeeeeeeek, keeeeeeeeeeeeeeek, eekeekeekeekeekek, eekeekeekeekeekee, eeeeekeekeekeekee, eeeeekeekeekeeeee, eeeeekeeeeekeeeee, keekeekeekeeeeeee, eeeeeeekeekeekeek, keekeekeeeeeeeeee, eeeeeeeeeekeekeek, keekeeeeeeeeeeeee, eeeeeeeeeeeeekeek, keekeekeekeekeek, keeekeeekeeekeek, keeeekeeeekeeeek, keeeeeeekeeeeeek, keeeeeeeeeeeeeek, kekeekeekeekeeke, eekeekeekeekeeke, eeeeekeekeekeeke, eeeeekeekeekeeee, eeeeekeeeeekeeee, keekeekeekeeeeee, eeeeeekeekeekeek, keekeekeeeeeeeee, eeeeeeeeekeekeek, keekeeeeeeeeeeee, eeeeeeeeeeeekeek, eeeeeeeeeeeeeeeeeed, eeeeeeeeeeeeeeeeeey, ennnnnnnnnnnnnnnnnn, and ennnnnnnnnnnnnnnnnne; wherein ‘e’ represents a 2′-MOE sugar moiety, ‘n’ represents a 2′-NMA sugar moiety, ‘k’ represents a cEt sugar moiety, ‘d’ represents a 2′-β-D-deoxyribosyl sugar moiety, and ‘y’ represents a 2′-OMe sugar moiety.

26. The oligomeric compound of any of claims 1-25, wherein the modified oligonucleotide comprises 4 blocks of phosphodiester linkages.

27. The oligomeric compound of any of claims 1-25, wherein the modified oligonucleotide comprises 3 blocks of phosphodiester linkages.

28. The oligomeric compound of any of claims 1-25, wherein the modified oligonucleotide comprises 2 blocks of phosphodiester linkages.

29. The oligomeric compound of any of claims 1-25, wherein the modified oligonucleotide comprises 1 block of phosphodiester linkages.

30. The oligomeric compound of any of claims 1-29, wherein at least one block of phosphodiester linkages consists of 4 contiguous phosphodiester linkages.

31. The oligomeric compound of any of claims 1-29, wherein at least one block of phosphodiester linkages consists of 3 contiguous phosphodiester linkages.

32. The oligomeric compound of any of claims 1-29, wherein at least one block of phosphodiester linkages consists of 2 contiguous phosphodiester linkages.

33. The oligomeric compound of any of claims 1-29, wherein each block of phosphodiester linkages consists of 1 or 2 contiguous phosphodiester linkages.

34. The oligomeric compound of any of claims 1-29, wherein at least one block of phosphodiester linkages consists of 1 phosphodiester linkage.

35. The oligomeric compound of any of claims 1-29, wherein each block of phosphodiester linkages consists of 1 phosphodiester linkage.

36. The oligomeric compound of any of claims 1-35, wherein the 5′-terminal internucleoside linkage of the modified oligonucleotide is a phosphodiester linkage.

37. The oligomeric compound of any of claims 1-36, wherein the 3′-terminal internucleoside linkage of the modified oligonucleotide is a phosphodiester linkage.

38. The oligomeric compound of any of claims 1-37, wherein the 5′-penultimate internucleoside linkage of the modified oligonucleotide is a phosphodiester linkage.

39. The oligomeric compound of any of claims 1-38, wherein the 3′-penultimate internucleoside linkage is a phosphodiester linkage.

40. The oligomeric compound of any of claims 1-39, wherein the 4^{th} internucleoside linkage from the 5′-end of the modified oligonucleotide is a phosphodiester linkage.

41. The oligomeric compound of any of claims 1-40, wherein at least one phosphodiester block is within the first 8 internucleoside linkages from the 5′-end of the modified oligonucleotide.

42. The oligomeric compound of any of claims 1-40, wherein at least one phosphodiester block is within the first 6 internucleoside linkages from the 5′-end of the modified oligonucleotide.

43. The oligomeric compound of any of claims 1-40, wherein at least one phosphodiester block is within the first 4 internucleoside linkages from the 5′-end of the modified oligonucleotide.

44. The oligomeric compound of any of claims 1-40, wherein at least one phosphodiester block is within the first 2 internucleoside linkages from the 5′-end of the modified oligonucleotide.

45. The oligomeric compound of any of claims 1-40, wherein each phosphodiester block is within the first 8 internucleoside linkages from the 5′-end of the modified oligonucleotide.

46. The oligomeric compound of any of claims 1-40, wherein each phosphodiester block is within the first 6 internucleoside linkages from the 5′-end of the modified oligonucleotide.

47. The oligomeric compound of any of claims 1-40, wherein each phosphodiester block is within the first 4 internucleoside linkages from the 5′-end of the modified oligonucleotide.

48. The oligomeric compound of any of claims 1-40, wherein each phosphodiester block is within the first 2 internucleoside linkages from the 5′-end of the modified oligonucleotide.

49. The oligomeric compound of any of claims 1-25, wherein the modified oligonucleotide has an internucleoside linkage motif (5′ to 3′) selected from: sososssssssssssss, ssosssssssssssoss, ssosssssosssssoss, ssosssosssosssoss, soossssssssssooss, sooosssssssssooss, sooossssssssoooss, sssssssooosssssss, ssossssssssssssss, ssssossssssssssss, ssssssossssssssss, ssssssssossssssss, ssssssssssossssss, ssssssssssssossss, ssssssssssssssoss, sossssssssssssoss, sosssssssssosssss, sosssssssosssssss, sosssssosssssssss, sosssosssssssssss, ssssosssssssssoss, ssssssosssssssoss, ssssssssosssssoss, ssssssssssosssoss, ssssssssssssososs, soossssssssssssss, sssoossssssssssss, sssssoossssssssss, sssssssoossssssss, sssssssssoossssss, sssssssssssoossss, sssssssssssssooss, sssssssoooossssss, ssoooosssssssssss, ssssoooosssssssss, ssssssssoooosssss, ssssssssssoooosss, sssssssssssooooss, ssssssooooossssss, ssssssoooooosssss, soooosssssssoooss, sssssooooooosssss, ssssssssssssssoss, ssssssssssssosss, sssssssssssssooss, ssssssssssssososs, sssssssssssosssss, sssssssssssososss, ssssssssssossosss, sssssssssosssssss, sssssssssosssosss, ssssssssosssssoss, ssssssssossssosss, sssssssosssssssss, sssssssoossssssss, sssssosssssssssss, sssosssssssssssss, sosssssssssssssss, sossssssossssssss, soossssssssssssss, ossssssssssssssssso, sssssssssssssssssoo, ssssssssssssssssoss, sssssssssssssssooss, ssssssssssssssososs, sssssssssosssssssss, sssssssssossssssoss, ssssssssoosssssssss, sosssssssssssssssss, sossssssssssssssoss, sosssssssosssssssss, sososssssssssssssss, soossssssssssssssss, sssssssssssssssssss, ssssssssssssssssso, ossssssssssssssssss, ssssssssssssososso, sssssssssssssssoss, sssssssssssssososs, ssssssssosssssssss, ssssssssossssssoss, sossssssssssssssss, sosssssssssssssoss, sossssssosssssssss, sosossssssssssssss, ssssssssssooooss, ssssssssoooossss, sssssssooossssss, ssssssoooossssss, ssssssooooosssss, sssssoooooosssss, sssssooooooossss, ssssoooossssssss, ssossssssssssoss, ssosssssossssoss, ssosssosssossoss, ssossossossososs, ssososososososss, ssoooossssssssss, soosssssssssooss, sooossssssssooss, sooosssssssoooss, soooossssssoooss, sssssssssooooss, ssssssssoooosss, ssssssooossssss, ssssssoooosssss, sssssooooosssss, sssssoooooossss, ssssoooosssssss, ssssooooooossss, sssosssosssosss, ssosssssssssoss, ssossossossosss, ssossossosososs, ssososososososs, ssoooosssssssss, soossssssssooss, sooosssssssooss, sooossssssoooss, and soooosssssoooss; wherein, ‘s’ represents a phosphorothioate internucleoside linkage and ‘o’ represents a phosphodiester internucleoside linkage.

50. The oligomeric compound of claim 1, wherein the modified oligonucleotide has a sugar motif (5′ to 3′) selected from eeeeeeeeeeeeeeeeee or nnnnnnnnnnnnnnnnn and an internucleoside linkage motif selected from sososssssssssssss, soossssssssssssss, sosssosssssssssss, sosssssosssssssss, sosssssssosssssss, sssoossssssssssss, sssssssoossssssss, sssssssssoossssss, and sssssssssssoossss.

51. The oligomeric compound of claim 1, wherein the modified oligonucleotide has a sugar motif (5′ to 3′) selected from eeeeeeeeeeeeeeeeeeee and ennnnnnnnnnnnnnnnnne, and an internucleoside linkage motif of ossssssssssssssssso.

52. The oligomeric compound of any of claims 1-51, wherein the modified oligonucleotide consists of 16 linked nucleosides.

53. The oligomeric compound of any of claims 1-51, wherein the modified oligonucleotide consists of 17 linked nucleosides.

54. The oligomeric compound of any of claims 1-51, wherein the modified oligonucleotide consists of 18 linked nucleosides.

55. The oligomeric compound of any of claims 1-51, wherein the modified oligonucleotide consists of 19 linked nucleosides.

56. The oligomeric compound of any of claims 1-51, wherein the modified oligonucleotide consists of 20 linked nucleosides.

57. The oligomeric compound of any of claims 1-56 comprising a conjugate group.

58. The oligomeric compound of claim 57, wherein a conjugate group is attached to the modified oligonucleotide at the 5′-end of the modified oligonucleotide.

59. The oligomeric compound of claim 57 or claim 58, wherein the conjugate group is attached to the modified oligonucleotide at the 3′-end of the modified oligonucleotide.

60. The oligomeric compound of any of claims 57-59, wherein the conjugate group comprises a lipid or lipophilic group, a carbohydrate, an antibody, a peptide, or a protein.

61. The oligomeric compound of any of claims 1-60, wherein the nucleobase sequence of the modified oligonucleotide is complementary to a pre-mRNA.

62. The oligomeric compound of claim 61, wherein the nucleobase sequence of the modified oligonucleotide is complementary to a splice modulation site of a pre-mRNA.

63. The oligomeric compound of claim 61 or claim 62, wherein the modified oligonucleotide is 80% complementary to the pre-mRNA.

64. The oligomeric compound of claim 61 or claim 62, wherein the modified oligonucleotide is 90% complementary to the pre-mRNA.

65. The oligomeric compound of claim 61 or claim 62, wherein the modified oligonucleotide is 95% complementary to the pre-mRNA.

66. The oligomeric compound of claim 61 or claim 62, wherein the modified oligonucleotide is 100% complementary to the pre-mRNA.

67. The oligomeric compound of any of claims 61-66, wherein the pre-mRNA is expressed in the CNS.

68. The oligomeric compound of any of claims 61-67, wherein the pre-mRNA is expressed in muscle.

69. The oligomeric compound of any of claims 61-68, wherein the pre-mRNA is selected from SMN2, SCN1A, DMD, APP, ATXN3, SmgGDS, PK-M, PK-M1, PK-M2, MAPT, LRP8, CLN3, IKBKAP, USH1C, LMNA, dysferlin, TGFBR1, C5, PKD1, ATXN1, ATXN7, CACNA1A, HTT, ATN1, TBP, or IL-1RAP.

70. The oligomeric compound of any of claims 61-68, wherein the pre-mRNA is other than SMN2, DMD, or SCN1A.

71. The oligomeric compound of any of claims 1-70, wherein the modified oligonucleotide has an internucleoside linkage motif (5′ to 3′) other than: soooosssssssoooo, sooossssssssooos, sooosssssssssoos, sooosssssssssssooos, soosssssssssooss, and sssssssssssoos; wherein, ‘s’ represents a phosphorothioate internucleoside linkage and ‘o’ represents a phosphodiester internucleoside linkage.

72. An oligomeric compound comprising a modified oligonucleotide consisting of 16-20 linked nucleosides, wherein:
each nucleoside of the modified oligonucleotide is either a sugar-modified nucleoside or a DNA nucleoside, provided that not more than 4 nucleosides are DNA nucleosides; and
each internucleoside linkage is either a phosphorothioate internucleoside linkage or a phosphodiester internucleoside linkage.

73. The oligomeric compound of claim 72, wherein the modified oligonucleotide comprises 1, 2, 3, 4, 5, 6, 7, 8, 9, 10, 11, 12, 13, 14, 15, 16, 17, 18, 19, or 20 sugar-modified nucleosides.

74. The oligomeric compound of claim 72 or claim 73, wherein the modified oligonucleotide has an internucleoside linkage motif (5′ to 3′) selected from: sososssssssssssss, ssosssssssssssoss, ssosssssosssssoss, ssosssosssosssoss, soossssssssssooss, sooosssssssssooss, sooossssssssoooss, sssssssooosssssss, ssossssssssssssss, ssssossssssssssss, ssssssossssssssss, ssssssssossssssss, ssssssssssossssss, ssssssssssssossss, ssssssssssssssoss, sossssssssssssoss, sosssssssssosssss, sosssssssosssssss, sosssssosssssssss, sosssosssssssssss, ssssosssssssssoss, ssssssosssssssoss, ssssssssosssssoss, ssssssssssosssoss, ssssssssssssososs, soossssssssssssss, sssoossssssssssss, sssssoossssssssss, sssssssoossssssss, sssssssssoossssss, sssssssssssoossss, sssssssssssssooss, sssssssoooossssss, ssoooosssssssssss, ssssoooosssssssss, ssssssssoooosssss, ssssssssssoooosss, sssssssssssooooss, ssssssooooossssss, ssssssoooooosssss, soooosssssssoooss, sssssooooooosssss, ssssssssssssssoss, ssssssssssssosss, sssssssssssssooss, ssssssssssssososs, sssssssssssosssss, sssssssssssososss, ssssssssssossosss, sssssssssosssssss, sssssssssosssosss, ssssssssosssssoss, ssssssssossssosss, sssssssosssssssss, sssssssoossssssss, sssssosssssssssss, sssosssssssssssss, sosssssssssssssss, sossssssossssssss, soossssssssssssss, ossssssssssssssssso, sssssssssssssssssoo, ssssssssssssssssoss, sssssssssssssssooss, ssssssssssssssososs, sssssssssosssssssss, sssssssssossssssoss, ssssssssoosssssssss, sosssssssssssssssss, sossssssssssssssoss, sosssssssosssssssss, sososssssssssssssss, soossssssssssssssss, sssssssssssssssssss, ssssssssssssssssso, ossssssssssssssssss, ssssssssssssososso, sssssssssssssssoss, sssssssssssssososs, ssssssssosssssssss, ssssssssossssssoss, sossssssssssssssss, sosssssssssssssoss, sossssssosssssssss, sosossssssssssssss, ssssssssssooooss, ssssssssoooossss, sssssssooossssss, ssssssoooossssss, ssssssooooosssss, sssssoooooosssss, sssssooooooossss, ssssoooossssssss, ssossssssssssoss, ssosssssossssoss, ssosssosssossoss, ssossossossososs, ssososososososss, ssoooossssssssss, soosssssssssooss, sooossssssssooss, sooosssssssoooss, soooossssssoooss, sssssssssooooss, ssssssssoooosss, ssssssooossssss, ssssssoooosssss, sssssooooosssss, sssssoooooossss, ssssoooosssssss, ssssooooooossss, sssosssosssosss, ssosssssssssoss, ssossossossosss, ssossossosososs, ssososososososs, ssoooosssssssss, soossssssssooss, sooosssssssooss, sooossssssoooss, and soooosssssoooss; wherein, ‘s’ represents a phosphorothioate internucleoside linkage and ‘o’ represents a phosphodiester internucleoside linkage.

75. The oligomeric compound of claim 74 having a sugar motif (5′ to 3′) selected from: eeeeeeeeeeeeeeeeeeee, eeeeeeeeeeeeeeeeeee, eeeeeeeeeeeeeeeeee, eeeeeeeeeeeeeeeee, eeeeeeeeeeeeeeee, nnnnnnnnnnnnnnnn, nnnnnnnnnnnn, nnnnnnnnnn nnnnnnnnnnnnnnnnn, nnnnnnnnnnn nennnnneneennnnnnn, nnnnnnnnnnnnenneen, nennnnneneenenneen, nnnnnnnnnnnnnnnnnne, nnnnnnnnnnnnnnnnnnd, nnnnnnnnnnnnnnnnnny, nnnnnnnnnnnnnnnnnndd, nnnnnnnnnnnnnnned, nnnnnnnnnnnnnnnnnnde, nnnnnnnnnnnnnnnnnnee, eeeeeeeeeeeeeeeeeedd, eeeeeeeeeeeeeeeeeeed, eeeeeeeeeeeeeeeeeede, nnnnnnnnnnnnnnnnnnd, nnnnnnnnnnnnnnnnnne, eeeeeeeeeeeeeeeeeed, keekeekeekeekeeeek, keeekeeekeeekeeeek, keeeeekeeeeekeeeek, keeeeeeekeeeeeeeek, keeeeeeeeeeeeeeeek, eeekeekeekeekeekek, eeekeekeekeekeekee, eeeeeekeekeekeekee, eeeeeekeekeekeeeee, eeeeeekeeeeekeeeee, keekeekeekeeeeeeee, eeeeeeeekeekeekeek, keekeekeeeeeeeeeee, eeeeeeeeeeekeekeek, keekeeeeeeeeeeeeee, eeeeeeeeeeeeeekeek, keekeekeekeekeeek, keeekeeekeeekeeek, keeeekeeeeekeeeek, keeeeeeekeeeeeeek, keeeeeeeeeeeeeeek, eekeekeekeekeekek, eekeekeekeekeekee, eeeeekeekeekeekee, eeeeekeekeekeeeee, eeeeekeeeeekeeeee, keekeekeekeeeeeee, eeeeeeekeekeekeek, keekeekeeeeeeeeee, eeeeeeeeeekeekeek, keekeeeeeeeeeeeee, eeeeeeeeeeeeekeek, keekeekeekeekeek, keeekeeekeeekeek, keeeekeeeekeeeek, keeeeeeekeeeeeek, keeeeeeeeeeeeeek, kekeekeekeekeeke, eekeekeekeekeeke, eeeeekeekeekeeke, eeeeekeekeekeeee, eeeeekeeeeekeeee, keekeekeekeeeeee, eeeeeekeekeekeek, keekeekeeeeeeeee, eeeeeeeeekeekeek, keekeeeeeeeeeeee, eeeeeeeeeeeekeek, eeeeeeeeeeeeeeeeeed, eeeeeeeeeeeeeeeeeey, ennnnnnnnnnnnnnnnnn, and ennnnnnnnnnnnnnnnnne; wherein ‘e’ represents a 2′-MOE sugar moiety, ‘n’ represents a 2′-NMA sugar moiety, ‘k’ represents a cEt sugar moiety, ‘d’ represents a 2′-β-D-deoxyribosyl sugar moiety, and ‘y’ represents a 2′-OMe sugar moiety.

76. The oligomeric compound of claim 73 or claim 74, wherein the modified oligonucleotide has a sugar motif (5′ to 3′) selected from eeeeeeeeeeeeeeeeee or nnnnnnnnnnnnnnnnnn and an internucleoside linkage motif selected from sososssssssssssss, soossssssssssssss, sosssosssssssssss, sosssssosssssssss, sosssssssosssssss, sssoossssssssssss, sssssssoossssssss, sssssssssoossssss, and sssssssssssoossss.

77. The oligomeric compound of claim 73 or claim 74, wherein the modified oligonucleotide has a sugar motif (5′ to 3′) selected from eeeeeeeeeeeeeeeeeeee and ennnnnnnnnnnnnnnnnne, and an internucleoside linkage motif of ossssssssssssssssso.

78. The oligomeric compound of any of claims 72-77 comprising a conjugate group.

79. The oligomeric compound of claim 78, wherein a conjugate group is attached to the modified oligonucleotide at the 5′-end of the modified oligonucleotide.

80. The oligomeric compound of claim 78 or claim 79, wherein the conjugate group is attached to the modified oligonucleotide at the 3′-end of the modified oligonucleotide.

81. The oligomeric compound of any of claims 78-80, wherein the conjugate group comprises a lipid or lipophilic group, a carbohydrate, an antibody, a peptide, or a protein.

82. The oligomeric compound of any of claims 73-81, wherein the nucleobase sequence of the modified oligonucleotide is complementary to a pre-mRNA.

83. The oligomeric compound of claim 82, wherein the nucleobase sequence of the modified oligonucleotide is complementary to a splice modulation site of a pre-mRNA.

84. The oligomeric compound of claim 82 or claim 83, wherein the modified oligonucleotide is 80%, 90%, 95%, or 100% complementary to the pre-mRNA.

85. The oligomeric compound of any of claims 82-84, wherein the pre-mRNA is expressed in the CNS.

86. The oligomeric compound of any of claims 82-84, wherein the pre-mRNA is expressed in muscle.

87. The oligomeric compound of any of claims 82-84, wherein the pre-mRNA is selected from SMN2, SCN1A, DMD, APP, ATXN3, SmgGDS, PK-M, PK-M1, PK-M2, MAPT, LRP8, CLN3, IKBKAP, USH1C, LMNA, dysferlin, TGFBR1, C5, PKD1, ATXN1, ATXN7, CACNA1A, HTT, ATN1, TBP, or IL-1RAP.

88. The oligomeric compound of any of claims 82-84, wherein the pre-mRNA is other than SMN2, DMD, or SCN1A.

89. The oligomeric compound of any of claims 72-88, having an internucleoside linkage motif (5′ to 3′) other than: soooosssssssoooo, sooossssssssooos, sooosssssssssoos, sooosssssssssssooos, soosssssssssooss, and sssssssssssoos; wherein, ‘s’ represents a phosphorothioate internucleoside linkage and ‘o’ represents a phosphodiester internucleoside linkage.

90. A pharmaceutical composition comprising an oligomeric compound of any of claims 1-89 and a pharmaceutically acceptable diluent.

91. The pharmaceutical composition of claim 90, wherein the pharmaceutically acceptable diluent is selected from water, saline, PBS, and artificial CSF.

92. A method comprising contacting a cell with the oligomeric compound of any of claims 1-89.

93. A method of modulating splicing of a pre-mRNA in a cell comprising contacting the cell with an oligomeric compound of any of claims 1-89 and thereby modulating splicing of the pre-mRNA in the cell.

94. The method of claim 93, wherein the modulating of the pre-mRNA is inducing exon skipping in the pre-mRNA.

95. The method of claim 93, wherein the modulating of the pre-mRNA is inducing intron retention.

96. The method of claim 93, wherein the modulating of the pre-mRNA results on alternative splicing.

97. The method of any claims 92-96, wherein the resulting mRNA is a substrate for nonsense mediated decay.

98. The method of any of claims 92-97, wherein in the cell is in an animal.

99. A method comprising administering to an animal the pharmaceutical composition of claim 90 or claim 91.

100. The method of claim 99, wherein the animal has a disease or disorder associated with altered splicing of a pre-mRNA.

101. A method of treating a disease or condition in an animal comprising administering to an animal the pharmaceutical composition of claim 90 or claim 91 and thereby treating the disease or condition in the animal.

102. The method of claim 101, wherein the disease or condition is associated with altered splicing of a pre-mRNA.

103. The method of claim 101, wherein the disease or condition is not associated with altered splicing of a pre-mRNA.

104. The method of any of claims 98-103, wherein the animal is a human.

105. The method of any of claims 99-104, wherein the pharmaceutical composition is administered to the CNS.

106. The method of any of claims 99-104, wherein the pharmaceutical composition is administered systemically.

107. An oligomeric compound of any of claims 1-89 for use in modulating splicing.

108. An oligomeric compound of any of claims 1-89 for use in therapy.
